(19) United States
(12) Patent Application Publication
(10) Pub. No.: US 2026/0096561 A1
(43) Pub. Date: Apr. 9, 2026

(54) BACTERIOPHAGE HAVING BACTERIOLYTIC ACTIVITY AGAINST XANTHOMONAS BACTERIA

(71) Applicants: KANEKA CORPORATION, Osaka (JP); RAKUNO GAKUEN UNIVERSITY, Hokkaido (JP); MITSUI & CO., LTD., Tokyo (JP)

(72) Inventors: Shinichi Yoshida, Shizuoka (JP); Nobuhiko Dojun, Shizuoka (JP); Hidetomo Iwano, Hokkaido (JP); Hitoshi Kudo, Tokyo (JP)

(73) Assignees: KANEKA CORPORATION, Osaka (JP); RAKUNO GAKUEN UNIVERSITY, Hokkaido (JP); MITSUI & CO., LTD., Tokyo (JP)

(21) Appl. No.: 19/402,216

(22) Filed: Nov. 26, 2025

Related U.S. Application Data
(63) Continuation of application No. PCT/JP2024/019669, filed on May 29, 2024.

(30) Foreign Application Priority Data
May 31, 2023 (JP) 2023-089380

(51) Int. Cl. A01N 63/40; A01P 1/00; C12Q 1/04

(52) U.S. Cl. CPC A01N 63/40; A01P 1/00; C12Q 1/04

(57) ABSTRACT

Methods are provided for controlling a plant disease caused by a bacterium of genus Xanthomonas, comprising contacting a bacteriophage to a target plant, and for identifying a bacterium of the genus Xanthomonas, involving: culturing a test bacterium isolated from a plant tissue affected by a plant disease to obtain a culture; mixing the culture with a bacteriophage to obtain a mixture; culturing the mixture under a predetermined condition; and determining that the test bacteria are bacteria of the genus Xanthomonas when the test bacteria are lysed after the mixture-culturing step.

### SEQUENCE LISTING

[0001] This application contains a sequence listing in computer readable form (File name: PH-10246-PCT_SequenceListing.xml; date of creation: Oct. 16, 2025; File size: 874,999 bytes) which is incorporated herein by reference in its entirety and forms part of the disclosure.

### TECHNICAL FIELD

[0002] One or more embodiments of the present invention relates to a bacteriolytic agent comprising a bacteriophage, a plant disease control composition containing the bacteriolytic agent, and a method for controlling a plant disease.

### BACKGROUND

[0003] Bacteriophage (often abbreviated herein simply as “phage”) is a generic term for viruses that infect only bacteria. Many phages, which are also referred to as lytic phages, specifically adsorb to a target bacterium (host), which is a host, then inject their own DNA, and self-amplify using the translation mechanism of the bacterium. Further, the bacterium is lysed to disperse the amplified phage, and infection of other target bacterium is repeated (NPL 1).

[0004] Many bacteria of the genus Xanthomonas are known as causative bacteria of diseases of plants including various agricultural crops, and copper agents and antibiotics have been used for general conventional control. However, there are many problems such as drug efficacy, phytotoxicity, and possible causes of disruption of bacterial flora balance. Therefore, in recent years, a method using phage has been attracting attention as a new control method (NPL 2).

[0005] For example, PLTs 1 to 3 and NPL 2 report examples of phages having bacteriolytic activity against bacteria of the genus Xanthomonas. However, since the host range of phage is extremely narrow, it is still important to search for a novel phage or find a phage having higher bacteriolytic activity.

### CITATION LIST

### Patent Literature

[0006] PLT 1: Japanese Unexamined Patent Publication No. 2016-32435
[0007] PLT 2: Japanese Unexamined Patent Publication No. 2021-102635
[0008] PLT 3: International Publication No. 2017/113029

### Non Patent Literature

[0009] NPL 1: Sharma S. et al., Folia Microbiol., 2017, 62:17-55
[0010] NPL 2: Nakayinga R. et al., BMC Microbiology, 2021, 21:291

### SUMMARY

[0011] In order to solve the above-mentioned problems, the present inventors focused on bacteriophages. Unlike conventional copper agents and antibiotics, phages, which are viruses, are natural products, and therefore, manifestation of phytotoxicity has not been reported so far. In addition, since the specificity to the host is very high, only bacteria of a specific genus or species are targeted, and the influence on the bacterial flora balance is extremely limited. Further, phages are harmless not only to animals including humans but also to plants, and are highly safe. Therefore, in order to suppress damage to agricultural products due to plant diseases caused by bacteria of the genus Xanthomonas, a novel phage exhibiting bacteriolytic activity against bacteria of the genus Xanthomonas is isolated. Another objective of one or more embodiments of the present invention is to provide a composition containing the phage as an active ingredient, and to apply the composition to disease control, detection of pathogenic bacteria, and the like.

[0012] The present inventors isolated novel phages from natural sewage or soil by using a technique for detecting a lysis plaque formed on a soft agar culture medium on which a bacterium of the genus Xanthomonas has been cultured, and analyzed their genome sequences. As a result, it was revealed that the phages have novel genomic DNA sequences to which no analogous sequence has been known at all. One or more embodiments of the present invention has been completed based on the above research and development results. Specifically, the following are provided.
[0013] [1] A bacteriolytic agent comprising a bacteriophage having a genomic DNA sequence comprising a base sequence shown in any one of SEQ ID NOs: 1 to 3.
[0014] [2] The bacteriolytic agent according to [1], which exhibits bacteriolytic activity against a bacterium of the genus Xanthomonas.
[0015] [A-1] A bacteriolytic agent comprising a bacteriophage having a genomic DNA sequence comprising a base sequence represented by any one of the following (1a) to (1c): (1a) a base sequence shown in SEQ ID NO: 1, (1b) a base sequence shown in SEQ ID NO: 1 in which one or more bases are added, deleted, and/or substituted, and (1c) a base sequence having 95% or more sequence identity to the base sequence shown in SEQ ID NO: 1.
[0016] [A-2] The bacteriolytic agent according to [A-1], which exhibits bacteriolytic activity against a bacterium of the genus Xanthomonas.
[0017] [A-3] The bacteriolytic agent according to [A-2], wherein the bacterium of the genus Xanthomonas is at least one bacterium selected from the group consisting of Xanthomonas arboricola, Xanthomonas campestris and Xanthomonas citri.
[0018] [B-1] A bacteriolytic agent comprising a bacteriophage having a genomic DNA sequence comprising a base sequence represented by any one of the following (2a) to (2c) and having a full length of 40,000 bases or less: (2a) a base sequence shown in SEQ ID NO: 2, (2b) a base sequence shown in SEQ ID NO: 2 in which one or more bases are added, deleted, and/or substituted, or (2c) a base sequence having 90% or more sequence identity to the base sequence shown in SEQ ID NO: 2.
[0019] [B-2] The bacteriolytic agent according to [B-1], which exhibits bacteriolytic activity against a bacterium of the genus Xanthomonas.
[0020] [B-3] The bacteriolytic agent according to [B-2], wherein the bacterium of the genus Xanthomonas is Xanthomonas arboricola and/or Xanthomonas campestris.
[0021] [C-1] A bacteriolytic agent comprising a bacteriophage having a genomic DNA sequence comprising a base sequence represented by any one of the following (3a) to (3c): (3a) a base sequence shown in SEQ ID NO: 3, (3b) a base sequence shown in SEQ ID NO: 3 in which one or more bases are added, deleted, and/or substituted, or (3c) a base sequence having 90% or more sequence identity to the base sequence shown in SEQ ID NO: 3.
[0022] [C-2] The bacteriolytic agent according to [C-1], which exhibits bacteriolytic activity against a bacterium of the genus Xanthomonas.
[0023] [C-3] The bacteriolytic agent according to [C-2], wherein the bacterium of the genus Xanthomonas is Xanthomonas arboricola and/or Xanthomonas campestris.
[0024] [3] A composition comprising the bacteriolytic agent according to [1] or [2], or any one of [A-1] to [C-3] as an active ingredient.
[0025] [4] A plant disease control composition comprising the composition according to [3].
[0026] [5] The plant disease control composition according to [4], wherein the plant disease is a plant disease caused by a bacterium of the genus Xanthomonas.
[0027] [6] The plant disease control composition according to [4] or [5], which comprises another bacteriophage exhibiting bacteriolytic activity against a bacterium of the genus Xanthomonas.
[0028] [7] A method for controlling a plant disease, comprising a contact step of bringing the plant disease control composition according to any one of [4] to [6] into contact with a target plant.
[0029] [8] A method for identifying bacteria of the genus Xanthomonas, comprising: a culturing step of culturing test bacteria isolated from a plant tissue affected by a plant disease to obtain a culture; a mixing step of mixing the culture and the bacteriolytic agent according to [2] to obtain a mixture; a mixture-culturing step of culturing the mixture under a predetermined condition; and a determination step of determining that the test bacteria are bacteria of the genus Xanthomonas when the test bacteria are lysed after the mixture-culturing step.
[0030] [9] The method according to [8], wherein in the mixture-culturing step, the mixture further comprises a soft agar-containing liquid culture medium, and the mixture is cultured on a solid culture medium.
[0031] [10] The method according to [8], wherein in the culturing step, the culture comprises a soft agar-containing liquid culture medium, and the culture is cultured on a solid culture medium.
[0032] [11] The method according to any one of [8] to [10], further comprising an isolation step of isolating the test bacteria from the plant tissue affected by the plant disease prior to the culturing step.

[0033] This description includes the disclosure of Japanese Patent Application No. 2023-089380, based on which the present application claims priority.

### Advantageous Effects of One or More Embodiments of the Invention

[0034] The bacteriolytic agent of one or more embodiments of the present invention and a composition containing the bacteriolytic agent as an active ingredient can lyse a specific target bacterium.

[0035] According to the plant disease control composition of one or more embodiments of the present invention, diseases caused by specific target bacteria can be prevented and suppressed.

### BRIEF DESCRIPTION OF DRAWINGS

[0036] FIG. 1A shows the bacteriolytic activity of a first bacteriophage obtained in Example 1. FIG. 1A is a diagram showing the results of culturing bacteria of the genus Xanthomonas and Pseudomonas fluorescens for control on agar plates, then dropping a purified first phage liquid onto the center of each plate, and performing static culture.

[0037] FIG. 1B is a plate diagram corresponding to FIG. 1A, showing the bacteria shown in Table 2 spread on each plate.

[0038] FIG. 2A shows the bacteriolytic activity of the first bacteriophage obtained in Example 1. FIG. 2A is a diagram showing the results of culturing bacteria of the genus Xanthomonas and Pseudomonas fluorescens for control spread on agar plates, then dropping the purified first phage liquid onto the center of each plate, and performing static culture.

[0039] FIG. 2B is a plate diagram corresponding to FIG. 2A, showing the bacteria shown in Table 2 spread on each plate.

[0040] FIG. 3A shows the bacteriolytic activity of a second bacteriophage obtained in Example 2. FIG. 3A is a diagram showing the results of culturing bacteria of the genus Xanthomonas and Pseudomonas fluorescens for control on agar plates, dropping the purified second phage liquid onto the center of each plate, and performing static culture.

[0041] FIG. 3B is a plate diagram corresponding to FIG. 3A, showing the bacteria shown in Table 4 spread on each plate.

[0042] FIG. 4A shows the bacteriolytic activity of the second bacteriophage obtained in Example 2. FIG. 4A is a diagram showing the results of culturing bacteria of the genus Xanthomonas shown in Table 4 and Pseudomonas fluorescens for control spread on agar plates, and then dropping a purified second phage liquid to the center of each plate, and performing static culture.

[0043] FIG. 4B is a plate diagram corresponding to FIG. 4A, showing the bacteria shown in Table 4 spread on each plate.

[0044] FIG. 5A shows the bacteriolytic activity of a third bacteriophage obtained in Example 3. FIG. 5A is a diagram showing the results of culturing bacteria of the genus Xanthomonas and Pseudomonas fluorescens for control on agar plates, dropping a purified third phage liquid onto the central portion of each plate, and performing static culture.

[0045] FIG. 5B is a plate diagram corresponding to FIG. 5A, showing the bacteria shown in Table 5 spread on each plate.

[0046] FIG. 6A shows the bacteriolytic activity of combinations of the first bacteriophage with other bacteriophages tested in Example 4. FIG. 6A is a diagram showing the results of culturing bacteria of the genus Xanthomonas spread on agar plates, dropping a purified phage liquid on each plate, and performing static culture.

[0047] FIG. 6B is a plate diagram corresponding to FIG. 6A, and shows the types of phage contained in the purified phage liquid dropped on each plate. In FIGS. 6A and 6B, the two columns on the left (1, 2, 5, 6, 9 and 10) show the plates on which the bacteria whose identifier is MAFF No. 673005 were spread, and the two columns on the right (3, 4, 7, 8, 11 and 12) show the plates on which the bacteria whose identifier is MAFF No. 301352 were spread. In FIG. 6B, a represents the first phage having the genomic DNA sequence of SEQ ID NO: 1, b represents a phage having the genomic DNA sequence of SEQ ID NO: 4, c represents a phage having the genomic DNA sequence of SEQ ID NO: 5, d represents a phage having the genomic DNA sequence of SEQ ID NO: 6, e represents a phage having the genomic DNA sequence of SEQ ID NO: 7, f represents the second phage having the genomic DNA sequence of SEQ ID NO: 2, g represents the third phage having the genomic DNA sequence of SEQ ID NO: 3, and h represents a phage having the genomic DNA sequence of SEQ ID NO: 8. In the figure, “/” indicates that phages before and after “/” are used in combination. For example, “a/f” indicates that the first phage and the second phage are used in combination.

[0048] FIG. 7A shows the bacteriolytic activity of combinations of the second bacteriophage with other bacteriophages tested in Example 5. FIG. 7A is a diagram showing the results of culturing bacteria of the genus Xanthomonas spread on agar plates, dropping a purified phage liquid onto each plate, and performing static culture.

[0049] FIG. 7B is a plate diagram corresponding to FIG. 7A, and shows the types of phage contained in the purified phage liquid dropped on each plate. In FIGS. 7A and 7B, the two columns on the left (1, 2, 5, 6, 9 and 10) show the plates on which bacteria whose identifier is MAFF No. 673005 were spread, and the two columns on the right (3, 4, 7, 8, 11 and 12) show the plates on which bacteria whose identifier is MAFF No. 301352 were spread. In FIG. 7B, a represents the second phage having the genomic DNA sequence of SEQ ID NO: 2, b represents the phage having the genomic DNA sequence of SEQ ID NO: 4, c represents the phage having the genomic DNA sequence of SEQ ID NO: 5, d represents the phage having the genomic DNA sequence of SEQ ID NO: 6, e represents the phage having the genomic DNA sequence of SEQ ID NO: 7, f represents the first phage having the genomic DNA sequence of SEQ ID NO: 1, g represents the third phage having the genomic DNA sequence of SEQ ID NO: 3, and h represents the phage having the genomic DNA sequence of SEQ ID NO: 8. In the figure, “/” indicates that phages before and after “/” are used in combination. For example, “a/f” indicates that the second phage and the first phage are used in combination.

[0050] FIG. 8A shows the bacteriolytic activity of combinations of the second bacteriophage with other bacteriophages tested in Example 6. FIG. 8A is a diagram showing the results of culturing bacteria of the genus Xanthomonas spread on agar plates, dropping a purified phage liquid onto each plate, and performing static culture.

[0051] FIG. 8B is a plate diagram corresponding to FIG. 8A, and shows the types of phage contained in the purified phage liquid dropped on each plate. In FIGS. 8A and 8B, the left two columns (1, 2, 5, 6, 9, and 10) show plates on which bacteria having an identifier of MAFF No. 673005 were spread, the third column from the left (3, 7, and 11) shows plates on which bacteria having an identifier of MAFF No. 301257 were spread, and the rightmost column (4, 8, and 12) shows plates on which bacteria having an identifier of MAFF No. 106765 were spread. In FIG. 8B, a represents the third phage having the genomic DNA sequence of SEQ ID NO: 3, b represents the phage having the genomic DNA sequence of SEQ ID NO: 4, c represents the phage having the genomic DNA sequence of SEQ ID NO: 5, d represents the phage having the genomic DNA sequence of SEQ ID NO: 6, e represents the phage having the genomic DNA sequence of SEQ ID NO: 7, f represents the first phage having the genomic DNA sequence of SEQ ID NO: 1, g represents the second phage having the genomic DNA sequence of SEQ ID NO: 2, and h represents the phage having the genomic DNA sequence of SEQ ID NO: 8. In the figure, “/” indicates that phages before and after “/” are used in combination. For example, “a/f” indicates that the third phage and the first phage are used in combination.

[0052] FIG. 9 is a graph showing the results of a test for disease control effect on tomato bacterial blight tested in Example 7. The average incidence rate is given as a relative value to the untreated group.

[0053] FIG. 10 is a graph showing the results of a test for disease control effect on broccoli black rot tested in Example 8. The average incidence rate is given as a relative value to the untreated group. The numerical value shown in each bar graph indicates the type of phage used. In the figure, a represents the third phage having the genomic DNA sequence of SEQ ID NO: 3, b represents the phage having the genomic DNA sequence of SEQ ID NO: 9, c represents the phage having the genomic DNA sequence of SEQ ID NO: 8, d represents the phage having the genomic DNA sequence of SEQ ID NO: 10, e represents the phage having the genomic DNA sequence of SEQ ID NO: 5, f represents the phage having the genomic DNA sequence of SEQ ID NO: 6, g represents the phage having the genomic DNA sequence of SEQ ID NO: 7, and h represents the phage having the genomic DNA sequence of SEQ ID NO: 11. In the figure, “/” indicates that phages before and after “/” are used in combination. For example, “a/b” indicates that the third phage and the phage having the genomic DNA sequence of SEQ ID NO: 9 are used in combination.

### DESCRIPTION OF EMBODIMENTS

### 1. Bacteriolytic Agent

### 1-1. Overview

[0054] A first aspect of one or more embodiments of the present invention is a bacteriolytic agent. The bacteriolytic agent comprises a bacteriophage having a genome sequence containing a specific base sequence.

[0055] The bacteriolytic agent of one or more embodiments of the present invention exhibits bacteriolytic activity specific to a target bacterium which can be a pathogenic bacterium of a plant disease.

### 1-2. Definition

[0056] The terms used herein are defined below.

[0057] As used herein, the term “bacteriolytic agent” refers to an agent comprising a bacteriophage having bacteriolytic activity against a target bacterium.

[0058] “Bacteria” are one of the major lineages of organisms that, together with archaea and eukaryotes, trisect the entire kingdom of life. Bacteria are made of cells without a cell nucleus and are capable of self-replication if there is a nutrient source. The names of bacteria are indicated by genus and species under the family based on the International Code of Nomenclature of Bacteria.

[0059] As used herein, the term “target bacterium” refers to a host bacterium which can be a target of the phage constituting the bacteriolytic agent of one or more embodiments of the present invention or the phage contained in the composition and the plant disease control composition of one or more embodiments of the present invention. For example, the target bacterium is a bacterium having a membrane surface receptor on the outer cell membrane that is recognized by the phage. The “membrane surface receptor” is a site to which, for example, a tail and a tail fiber of a phage bind, and is composed of a protein, a lipopolysaccharide, a pilus, and the like present in the outer layer of a bacterial outer membrane. Specific examples of the target bacteria in the present specification include bacteria of the genus Xanthomonas.

[0060] The “bacteria of the genus Xanthomonas” are bacteria belonging to the genus Xanthomonas. Bacteria of the genus Xanthomonas generally produce a yellow pigment called xanthomonadin, many of which are known as plant pathogenic bacteria. Further, there are subtypes and pathovars as a lower classification than the species, and they are indicated by adding subsp. or pv. after the bacterial name. The minimum unit of classification is a strain, which refers to a population of cells considered to be genetically uniform. The following Table 1 shows representative bacteria of the genus Xanthomonas, host plants thereof, and plant diseases caused thereby.

TABLE 1

| Species | Pathovar | Host | Disease |
|---|---|---|---|
| X. arboricola | pruni | Peach | Bacterial spot |
| X. arboricola | juglandis | Walnut | Bacterial blight |
| X. arboricola | corylina | Turkish Hazel | Leaf spot |
| X. axonopodis | citrumelo | Citrus | Bacterial spot |
| X. axonopodis | glycines | Soybean | Bacterial pustule |
| X. axonopodis | manihotis | Cassava | Bacterial blight |
| X. axonopodis | malvacearum | Cotton | Bacterial blight |
| X. axonopodis | punicae | Pomegranate | Leaf blight |
| X. albilineans | | Sugarcane | Leaf scald |
| X. campestris | campestris | Cabbage | Black rot |
| X. campestris | musacearum | Banana | Bacterial wilt |
| X. campestris | vasculorum | Sugarcane | Gumming disease |
| X. campestris | vesicatoria | Tomate/Pepper | Bacterial spot |
| X. campestris | vitians | Lettuce | Bacterial spot |
| X. campestris | raphani | Cabbage | Leaf spot |
| X. citri | citri | Orange | Bacterial canker |
| X. citri | malvacearum | Cotton | Angular leaf spot |
| X. citri | mangiferaeindicae | Mango | Black spot |
| X. cucurbitae | | Pumpkin | Bacterial Spot |
| X. fragariae | | Strawberry | Angular leaf spot |
| X. fuscans | fuscans | Bean | Bacterial blight |
| X. hortorum | carotae | Carrot | Bacterial blight |
| X. oryzae | oryzae | Rice | Leaf blight |

[0061] Without limitation, among the bacteria of the genus Xanthomonas, Xanthomonas arboricola, Xanthomonas citri and Xanthomonas campestris are particularly preferred as the target bacteria of one or more embodiments of the present invention. Specific examples of Xanthomonas arboricola include Xanthomonas arboricola pv. pruni, the pathovar of which is pruni, and Xanthomonas arboricola pv. juglandis, the pathovar of which is juglandis. Xanthomonas citri subsp. citri may be mentioned as a specific example of Xanthomonas citrifolia. Specific examples of Xanthomonas campestris include Xanthomonas campestris pv. vesicatoria, the pathovar of which is vesicatoria, Xanthomonas campestris pv. vitians, the pathovar of which is vitians, and Xanthomonas campestris pv. campestris, the pathovar of which is campestris.

[0062] “Bacteriophage” (as mentioned above, often abbreviated herein simply as “phage”) is a generic term for viruses that infect bacteria. A general phage is composed of three parts, i.e., a head, a tail, and a tail fiber. The head is composed of a capsid (virus shell) having an icosahedral structure composed of a capsomere which is an outer coat protein, and contains the genomic DNA of the phage in the inner space thereof. The tail has a tubular structure composed of a tail tube protein and a sheath protein covering the tail tube protein. One end of the tail is connected to the head and the other end to the tail fiber. The tail serves as a transfer tube through which the genomic DNA in the head is injected into a bacterial host cell. The tail and tail fiber are composed of several fiber structures composed of tail fiber proteins. The tail and tail fiber are responsible for host recognition and adsorption functions, recognizing receptors present on the outer membrane surface of the host bacterium and adsorbing to its cell surface. Phages are highly host-specific, a feature based on the function of the tail and tail fiber. Since phages do not infect eukaryotes, agents using phages are harmless to humans, animals, and plants. Phages are roughly classified into “lytic cycle”, “lysogenic cycle”, and “lytic/lysogenic cycle” based on the mode of infection. In the lysogenic cycle, the phage integrates its own DNA into the bacterial chromosome without lysing the target bacterium and multiplies with bacterial growth. On the other hand, in the lytic cycle, the phage self-multiplies in the cell of the host bacterium, and then lyses the host bacterium to release a large amount of progeny phages. The phage of one or more embodiments of the present invention is a virulent phage that undergoes a lytic cycle.

[0063] As described above, the “tail fiber protein” is a protein constituting a tail fiber of a phage. The tail fiber protein is known to play important roles in the specificity of the host recognition and adsorption capability of the tail and tail fiber (Nobrega F. L. et al., Nat. Rev. Microbiol., 2018, 16:760-773).

[0064] The term “tail fiber gene” refers to a gene that is contained in the genomic DNA of a phage and encodes the tail fiber protein.

[0065] As described above, the “tail tube protein” is a protein constituting the tubular structure of the tail of a phage. The tail tube protein is known to interact with the tail fiber and, with the tail-fibers, play important roles in specificity of host recognition and adsorption capability (Maozhi Hu, et ai., 2020, 9:1, 855-867). As tail tube proteins, tail tube fiber protein A and tail tube protein B are known. The term “tail tube protein A” is a protein that forms a ring at a lower portion of the tubular structure of the tail and interacts with the tail fiber. The term “tail tube protein B” is a protein that forms the lower end of the tubular structure of the tail and binds to a receptor present on the outer membrane surface of the host bacterium.

[0066] The term “tail tube gene” refers to a gene that is contained in the genomic DNA of a phage and encodes the tail tube protein. The term “tail tube protein A gene” refers to a gene encoding tail tube protein A, and the term “tail tube protein B gene” refers to a gene encoding tail tube protein B.

[0067] “(Bacterio) lysis” refers to the phenomenon of destroying the cell membrane of a bacterium. As described above, this is a phenomenon mainly observed in the infection mode of virulent phage. By lysis, the bacteria are killed. Lysis starts with the phage specifically adsorbing to the target bacterium and injecting its DNA into the cell of the target bacterium via the tail. Thereafter, the phage replicates itself by utilizing the translation mechanism of the bacterium to produce a large amount of progeny phages, and then lyses the bacterium to release the progeny phages to the outside.

[0068] As used herein, the term “plant disease” is a generic term for diseases that occur in plants. Known plant diseases include diseases caused by infectious pathogens such as viruses, bacteria, filamentous fungi, actinomycetes, viroids, phytoplasmas, nematodes, mites, and insects, and diseases caused by non-infectious pathogens such as deficiency or excess of nutrients or water, and phytotoxicity. Plant diseases in the present specification refer to diseases caused by bacteria, i.e., plant pathogenic bacteria, unless otherwise specified. In the present specification, the plant pathogenic bacteria correspond to the above-described target bacteria, for example, bacteria of the genus Xanthomonas, unless otherwise specified.

[0069] As used herein, the term “control” refers to prevention or treatment (extermination) (according to HP of Japan Crop Protection Association). Therefore, the term “plant disease control” as used herein refers to the prevention of plant diseases, particularly against target bacteria, or the treatment of plant diseases caused by target bacteria.

[0070] As used herein, the term “target plant” refers to a plant to which the plant disease control composition of one or more embodiments of the present invention described below is applied. This plant corresponds to a plant which develops a specific plant disease due to infection with the target bacterium, or a plant which may be infected with the target bacterium.

### 1-3. Constitution

[0071] The bacteriolytic agent of one or more embodiments of the present invention comprises a bacteriophage.

### <First Phage>

[0072] The first phage is characterized by having a genomic DNA sequence comprising a specific base sequence, and the bacteriolytic agent of one or more embodiments of the present invention exhibits bacteriolytic activity specific to a target bacterium.

### (1-1) Genomic DNA

[0073] The first phage is such that the DNA sequence of the genome of the phage has the base sequence of 42,933 bp shown in SEQ ID NO: 1, or a base sequence shown in SEQ ID NO: 1 in which one or more bases are added, deleted and/or substituted, or a base sequence having a sequence identity of 92.15% or more, 92.2% or more, 92.3% or more, 92.5% or more, 93% or more, 93.5% or more, 94% or more, 94.5% or more, 95% or more, 95.5% or more, 96% or more, 96.5% or more, 97% or more, 97.5% or more, 98% or more, 98.5% or more, 99% or more, or 99.5% or more to the base sequence shown in SEQ ID NO: 1, or a base sequence having a sequence identity of 99.01% or more, 99.05% or more, 99.1% or more, 99.2% or more, 99.3% or more, 99.4% or more, 99.5% or more, 99.6% or more, 99.7% or more, 99.8% or more, or 99.9% or more when aligned with the base sequence shown in SEQ ID NO: 1, furthermore, a base sequence which hybridizes to a base sequence complementary to the base sequence shown in SEQ ID NO: 1 under highly stringent conditions.

[0074] It is not easy to align the entire range of a long genomic DNA sequence and use the aligned range as a comparison range. The range to be compared (hereinafter, sometimes referred to as Query Cover) is most particularly 100% of the entire genome of the first phage, but may be 99% or more, 98% or more, 97% or more, 96% or more, 95% or more, 94% or more, 93.5% or more, or 93% or more.

[0075] As used herein, the term “a plurality of” refers to 2 to 10, for example, 2 to 7, 2 to 5, 2 to 4, or 2 to 3.

[0076] As used herein, the term “(base) sequence identity” is a numerical value indicating the proportion of sites where the types of bases are identical within the comparison range between two base sequences. Even when two base sequences have different lengths, the base sequence identity can be calculated by aligning the two base sequences so that the degree of base identity within the comparison range is maximized. An exemplary, non-limiting algorithm for performing such an analysis is BLAST. BLAST can be used in various software and Web services. For example, the base sequence identity can be easily calculated using genetic information processing software GENETYX (https://www.genetyx.co.jp/), BLAST server (https://blast.ncbi.nlm.nih.gov/Blast.cgi) provided by NCBI, or the like. In addition to BLAST, there is an algorithm called FASTA or the like, which can be used as long as an appropriate identity can be calculated, and the method used is not particularly limited.

[0077] The term “highly stringent conditions” refers to environmental conditions under which non-specific hybridization is unlikely to occur. Under highly stringent conditions, a hybrid can be formed with a nucleic acid having a target base sequence, but a hybrid cannot be substantially formed with a nucleic acid having a nonspecific base sequence. In general, highly stringent conditions refer to conditions of low salt concentration and high temperature. The low salt concentration refers to, for example, 15 mM to 750 mM, particularly 15 mM to 500 mM, 15 mM to 300 mM or 15 mM to 200 mM. The high temperature is, for example, 50 to 68° C. or 55 to 70° C. Specific examples of the highly stringent conditions include conditions of washing at 65° C., 0.1×SSC and 0.1% SDS in washing after hybridization.

[0078] From another viewpoint, the phage is a virus, and there is a possibility that a mutation such as substitution, deletion, or insertion may occur in the genomic DNA when the phage of one or more embodiments of the present invention is amplified. As long as the degree of the mutation is within the above-described range with respect to the entire genomic DNA and the lytic function of the phage is maintained, the phage is included in one or more embodiments of the present invention even with such a mutation.

[0079] Depending on the software or the analysis server, Average Nucleotide Identity (ANI) or the like may be used as an index indicating sequence identity. It should be noted that it is not easy to align and arrange a long phage genomic DNA to cover the entire range to be compared. Therefore, the above-mentioned sequence identity may be present in the range of automatic alignment and arrangement by the above-mentioned software or Web service. For example, by analysis using the BLAST server provided by NCBI, a query sequence and a subject sequence are automatically aligned (herein often referred to as “aligned arrangement”) in the maximum alignable range, and a comparison range is determined. The sequence identity in the comparison range is calculated, and the ratio of the comparison range to the entire range of the query sequence may be calculated as a value called Query Cover.

[0080] These values may vary depending on how the query sequence and the subject sequence are selected. This point will be briefly described by taking a first sequence composed of a sequence A and a second sequence composed of the sequence A and a sequence B having the same length as the sequence A as an example. When the shorter first sequence is the query sequence and the longer second sequence is the subject sequence, the comparison range is the sequence A, and since the sequence A is the entire length of the first sequence, the calculated value of Query Cover is 100%. In addition, since the sequence A in the first sequence is the same as that in the second sequence, the value of sequence identity is 100%. On the other hand, when the longer second sequence is used as the query sequence and the shorter first sequence is used as the subject sequence, the value of the sequence identity is 100% as described above, but the value of the Query Cover is 50% because the sequence A occupies only half of the second sequence.

[0081] In such a case, the sequence identity of the base sequence in the entire range of the aligned base sequences (sequence identity in the entire range) can be estimated based on the result. For example, the value obtained by multiplying the Query Cover value by the value of sequence identity in the aligned and compared range (sequence identity in the aligned range) can be used as the estimated value of sequence identity in the entire range. At this time, in order to increase the accuracy of the estimated value, for example, a further correction such as inclusion of an expected sequence identity in a range other than the aligned range may be made.

[0082] The genomic DNA of the phage may be packaged in a linear form or in a circular form. In the next-generation genome sequencer analysis, genomic DNA is fragmented, then the base sequence of each fragment is read, and the sequence is determined through an analysis for connecting the fragments. In the case of phage, they are often connected without a reference genomic DNA sequence (de novo assembly). Therefore, it is difficult to unambiguously determine the starting point and end of the analyzed genome (Merrill, B. D., et al. BMC Genomics, 2016 17, 679). The starting points and the ends of the genome sequences to be compared may be different, and are automatically considered in the analysis using software or an analysis server.

[0083] Although not particularly limited, among the bacteria of the genus Xanthomonas, Xanthomonas arboricola, Xanthomonas citri and Xanthomonas campestris are particularly preferred as target bacteria of the first phage. Specific examples of Xanthomonas arboricola suitable as target bacteria of the first phage include Xanthomonas arboricola pv. pruni, the pathovar of which is pruni, and Xanthomonas arboricola pv. juglandis, the pathovar of which is juglandis. A specific example of Xanthomonas citri suitable as a target bacterium of the first phage is Xanthomonas citri subsp. citri. Specific examples of Xanthomonas campestris suitable as target bacteria of the first phage include Xanthomonas campestris pv. vesicatoria, the pathovar of which is vesicatoria, and Xanthomonas campestris pv. vitians, the pathovar of which is vitians.

### (1-2) Effect

[0084] The bacteriolytic agent of one or more embodiments of the present invention comprising the first phage can exhibit bacteriolytic activity against bacteria of the genus Xanthomonas and can be applied to plant diseases.

### <Second Phage>

[0085] The second phage is characterized by having a genomic DNA sequence of a specific length comprising a specific base sequence, and the bacteriolytic agent of one or more embodiments of the present invention exhibits bacteriolytic activity specific to a target bacterium.

### (2-1) Genomic DNA

[0086] The second phage is such that the DNA sequence of the genome of the phage has a base sequence of 35,321 bp shown in SEQ ID NO: 2, or a base sequence shown in SEQ ID NO: 2 in which one or more bases are added, deleted and/or substituted, or a base sequence having a sequence identity of 90% or more, 90.5% or more, 91% or more, 91.5% or more, 92% or more, 92.5% or more, 93% or more, 93.5% or more, 94% or more, 94.5% or more, 95% or more, 95.5% or more, 96% or more, 96.5% or more, 97% or more, 97.5% or more, 98% or more, 98.5% or more, 99% or more or 99.5% or more to the base sequence shown in SEQ ID NO: 2, a base sequence having a sequence identity of 95.0% or more, 95.5% or more, 96.0% or more, 96.5% or more, 97.0% or more, 97.5% or more, 98.0% or more, 98.5% or more, 99% or more, 99.5% or more, 99.6% or more, 99.7% or more, 99.8% or more, or 99.9% or more when aligned with the base sequence shown in SEQ ID NO: 2, furthermore, a base sequence that hybridizes to a base sequence complementary to the base sequence shown in SEQ ID NO: 2 under highly stringent conditions.

[0087] It is not easy to use the entire range of a long genomic DNA sequence as a comparison range. The range to be compared (hereinafter may be referred to as Query Cover) is most particularly 100% of the entire genome length of the second phage, but may be 99% or more, 98% or more, 97% or more, 96% or more, 95% or more, 94% or more, or 93% or more.

[0088] The genomic DNA sequence of the second phage has a total length of 40,000 bases or less. For example, the full length of the genomic DNA sequence is 40,000 bases or less, 39,500 bases or less, 39,000 bases or less, 38,500 bases or less, 38,000 bases or less, 37,500 bases or less, 37,000 bases or less, 36,500 bases or less, 36,000 bases or less, 35,900 bases or less, 35,800 bases or less, 35,700 bases or less, 35,600 bases or less, 35,500 bases or less, 35,400 bases or less.

[0089] Although not particularly limited, among the bacteria of the genus Xanthomonas described above in the definition section, Xanthomonas arboricola and Xanthomonas campestris are particularly preferred as the target bacteria of the second phage. Specific examples of Xanthomonas arboricola suitable as target bacteria for the second phage include Xanthomonas arboricola pv. pruni, the pathovar of which is pruni, and Xanthomonas arboricola pv. juglandis, the pathovar of which is juglandis. Specific examples of Xanthomonas campestris suitable as target bacteria of the second phage include Xanthomonas campestris pv. vesicatoria, the pathovar of which is vesicatoria, Xanthomonas campestris pv. vitians, the pathovar of which is vitians, and Xanthomonas campestris pv. campestris, the pathovar of which is campestris.

### (2-2) Effect

[0090] The bacteriolytic agent of one or more embodiments of the present invention containing the second phage can exhibit bacteriolytic activity against bacteria of the genus Xanthomonas, and can be applied to plant diseases.

### <Third Phage>

[0091] The third phage is characterized by having a genomic DNA sequence containing a specific base sequence, and the bacteriolytic agent of one or more embodiments of the present invention exhibits bacteriolytic activity specific to a target bacterium.

### (3-1) Genomic DNA

[0092] The third phage is such that the DNA sequence of the genome of the phage has the base sequence of 43,601 bp shown in SEQ ID NO: 3, or a base sequence shown in SEQ ID NO: 3 in which one or more bases are added, deleted and/or substituted, or a base sequence having a sequence identity of 90% or more, 90.5% or more, 91% or more, 91.5% or more, 92% or more, 92.5% or more, 93% or more, 93.5% or more, 94% or more, 94.5% or more, 95% or more, 95.5% or more, 96% or more, 96.5% or more, 97% or more, 97.5% or more, 98% or more, 98.5% or more, 99% or more, or 99.5% or more to the base sequence shown in SEQ ID NO: 3, or a base sequence having a sequence identity of 96.9% or more, 97.0% or more, 97.5% or more, 98.0% or more, 98.5% or more, 99% or more, 99.5% or more, 99.6% or more, 99.7% or more, 99.8% or more, 99.9% or more when aligned with the base sequence shown in SEQ ID NO: 3, furthermore, a base sequence that hybridizes to a base sequence complementary to the base sequence shown in SEQ ID NO: 3 under highly stringent conditions.

[0093] It is not easy to use the entire range of a long genomic DNA sequence as a comparison range. The range to be compared (hereinafter, sometimes referred to as Query Cover) is most particularly 100% of the entire genome length of the third phage, but may be 99% or more, 98% or more, 97% or more, 96% or more, 95% or more, 94% or more, 93% or more, 92% or more, 91% or more, 90% or more, 89% or more, or 88% or more.

[0094] Although not particularly limited, among the bacteria of the genus Xanthomonas described above in the definition section, Xanthomonas arboricola and Xanthomonas campestris are desirable as target bacteria of the third phage. A specific example of Xanthomonas arboricola suitable as a target bacterium of the third phage may be Xanthomonas arboricola pv. juglandis, the pathovar of which is juglandis. Specific examples of Xanthomonas campestris suitable as target bacteria of the third phage include Xanthomonas campestris pv. vesicatoria, the pathovar of which is vesicatoria, Xanthomonas campestris pv. vitians, the pathovar of which is vitians, and Xanthomonas campestris pv. campestris, the pathovar of which is campestris.

### (3-2) Effect

[0095] The bacteriolytic agent of one or more embodiments of the present invention can exhibit bacteriolytic activity against bacteria of the genus Xanthomonas and can be applied to plant diseases.

### 2. Plant Disease Control Composition

### 2-1. Overview

[0096] A second aspect of one or more embodiments of the present invention is a composition, particularly a composition which can be used for controlling a plant disease. The composition of one or more embodiments of the present invention is characterized by comprising the bacteriolytic agent according to the first aspect as an active ingredient.

[0097] According to the composition of one or more embodiments of the present invention, it is possible to provide a sustainable agricultural agent against bacterial plant diseases, which is safe for the human body, has no drug-induced harmful effect on the environment, and is capable of specifically preventing or treating a target plant disease, when used for controlling a plant disease.

[0098] In the present specification, the term “plant disease control composition” refers to a case where the composition of one or more embodiments of the present invention is used for plant disease control.

### 2-2. Constitution

### 2-2-1. Components

[0099] The composition of one or more embodiments of the present invention comprises, as an essential component, the bacteriophage which is the bacteriolytic agent according to the first aspect as an active ingredient. An agriculturally acceptable carrier and/or medium may be included as long as it does not inhibit or suppress the bacteriolytic activity of the phage against the target bacteria. If necessary, the composition may further comprise other active ingredients. Hereinafter, each component will be described in detail.

### (1) Active Ingredient (Bacteriolytic Agent)

[0100] The composition of one or more embodiments of the present invention comprises the bacteriolytic agent according to the first aspect as an essential active ingredient. In the plant disease control composition, the target bacteria of one or more embodiments of the present invention are lysed by the active ingredient, and thus plant diseases caused by the target bacteria can be prevented or treated.

[0101] Since the specific constitution of the bacteriolytic agent has been described in detail in the first aspect, the description thereof is omitted here.

[0102] When the composition is used for controlling a plant disease, the amount of the active ingredient contained per unit amount in the composition varies depending on various conditions such as the dosage form, the type of plant pathogenic bacteria, the type of target plant, the place of application, and the method of application. It is desirable that the phage as an active ingredient is contained in an amount sufficient for contacting and infecting a plant pathogenic bacteria that have infected the target plant. Therefore, the amount of the bacteriolytic agent contained in the plant disease control composition of one or more embodiments of the present invention may be determined in consideration of each condition so that the bacteriolytic agent is contained in an effective amount against the target bacteria after application within the scope of common technical knowledge in the above-mentioned field.

### (2) Agriculturally Acceptable Carriers and Media

[0103] The term “agriculturally acceptable carrier and/or medium” refers to a substance that facilitates the application of the composition, can maintain the viability and infectivity of the phage as an active ingredient, and/or can control the rate of action, and has no or very little harmful influence on the environment such as soil and water quality when applied outdoors, and further has no or very little harmful influence on animals, particularly humans.

### (2-1) Carriers

[0104] Specific examples of agriculturally acceptable carriers include surfactants, protectants, excipients, and the like. If desired, minor amounts of wetting agents, emulsifying agents, pH buffering agents and the like may be utilized. The carriers may be pre-formulated or may be formulated just prior to application.

[0105] The surfactant has an effect of improving the physicochemical properties of the composition for plants, such as wettability, emulsifiability, dispersibility, penetrability, adhesiveness, defoaming property, and spreadability. The surfactant can be used as a main component of an agricultural adjuvant called a spreader. Examples of the spreader include a nonionic surfactant, a combination of a nonionic surfactant and an anionic surfactant, a paraffin-based compound, a paroxyethylene resin acid ester, and the like. More specific examples thereof include a polyoxyethylene alkyl ether compound, a polyoxyethylene fatty acid ester compound, a lignosulfonate compound, a naphthylmethanesulfonate compound, an alkylsulfosuccinate compound, and a tetraalkylammonium salt compound.

[0106] In the case of phage, the protectant is expected to have an effect of reducing damage caused by ultraviolet rays and the like. Examples thereof include skim milk, casein, gelatin and the like.

[0107] Examples of the excipient include glucose; lactose; sucrose; gelatin; starch; malt, wheat flour, and the like.

### (2-2) Solvent

[0108] Specific examples of agriculturally acceptable solvents include water (including aqueous solutions), buffers, or liquid culture media. The solvent is particularly a sterile liquid.

### (3) Other Active Ingredients

[0109] The composition of one or more embodiments of the present invention can comprise, in addition to the bacteriolytic agent described in the first aspect, one or more other active ingredients having the same and/or different pharmacological effect within a range where the bacteriolytic activity of the phage constituting the bacteriolytic agent is not affected.

[0110] The kind of other active ingredients is not limited. For example, it may be a phage having bacteriolytic activity against the same and/or different bacteria. Examples of the phage having bacteriolytic activity against the same bacterium include other phages which specifically recognize and bind to a bacterium of the genus Xanthomonas, similarly to the phage constituting the bacteriolytic agent described in the first aspect. For example, even when the target bacterium is the same, if the phages recognize different cell surface receptors, a synergistic effect or a complementary effect of the bacteriolytic activity can be expected by the combination thereof.

[0111] There are no particular limitations on the type of such other phage that specifically recognizes bacteria of the genus Xanthomonas and has bacteriolytic activity. Specific examples thereof include a phage whose genomic DNA comprises a base sequence shown in any one of SEQ ID NOs: 4 to 11, a mutant thereof, and a variant thereof.

[0112] The plant disease control composition of one or more embodiments of the present invention can comprise, as active ingredients, one or more other phages specifically recognizing bacteria of the genus Xanthomonas and having bacteriolytic activity as specifically exemplified above in combination, in addition to the bacteriolytic agent described in the first aspect.

[0113] In the above, the sequence identity of the amino acid sequence is particularly 95% or more, 96% or more, 97% or more, 98% or more, or 99% or more. As described above, the term “a plurality of” as used herein means 2 to 10, for example, 2 to 7, 2 to 5, 2 to 4, or 2 to 3.

[0114] The term “(amino acid) substitution” refers to a substitution between 20 amino acids constituting natural proteins within the corresponding one of conservative amino acid groups having similar properties such as charge, side chain, polarity, aromaticity, or the like. Examples of the substitution include a substitution within the group of uncharged polar amino acids having less polar side chains (Gly, Asn, Gln, Ser, Thr, Cys, Tyr), a substitution within the branched chain amino acid group (Leu, Val, Ile), a substitution within the neutral amino acid group (Gly, Ile, Val, Leu, Ala, Met, Pro), a substitution within the neutral amino acid group having hydrophilic side chains (Asn, Gln, Thr, Ser, Tyr, Cys), a substitution within the acidic amino acid group (Asp, Glu), a substitution within the basic amino acid group (Arg, Lys, His), and a substitution within the aromatic amino acid group (Phe, Tyr, Trp). Amino acid substitutions within these groups are particularly used because they are known to be less likely to alter the properties of the polypeptide.

[0115] Furthermore, in the present specification, “amino acid sequence identity” is a numerical value indicating the proportion of sites where the types of amino acid residues are identical within the comparison range of two amino acid sequences. The amino acid sequence identity can be calculated by aligning two amino acid sequences so that the degree of amino acid identity within the comparison range is the highest even when the two amino acid sequences have different lengths. An algorithm used for performing such an analysis can be, but is not limited to, the algorithm described above, such as BLAST.

[0116] In addition, insecticides, herbicides, fertilizers (for example, urea, ammonium nitrate, and superphosphate), and, if necessary, known agricultural chemicals, antibiotics, and agricultural biologicals can be included as other active ingredients.

### 2-2-2. Dosage Forms

[0117] When the composition of one or more embodiments of the present invention is used as a plant disease control composition, the composition may be in any dosage form as long as it can maintain the site of infection of a target bacterium on a target plant, the ability to colonize the target plant, and/or the ability of the phage as an active ingredient to easily infect the target bacterium. For example, the plant disease control composition may be suspended in an appropriate solution to form a liquid formulation or a wettable powder in a liquid state, or may be mixed with a carrier and solidified to form a powder, a granule, or a gel in a solid state. For example, when the infection site of the target bacterium in the target plant is a leaf, a flower, a fruit, a stem, a branch, or a trunk of the above-ground part, a liquid formulation, a wettable powder, or a gel, which is widely spread to the infection site and has high colonizing property, is suitable, but not limited thereto. On the other hand, when the infection site of the target bacterium is a root of an underground part or an underground stem, a powder or granule which is sustainedly released in the soil and can continuously exert an effect on the infection site is suitable, but not limited thereto.

### 2-3. Application Method

[0118] When the composition of one or more embodiments of the present invention is used as a plant disease control composition, the method for applying the composition is not particularly limited, and any method known in the art may be used as long as it can apply the plant disease control composition to a target plant. The phage, which is an active ingredient of the plant disease control composition, can be applied by an appropriate method according to the purpose because the phage can invade the target plant through the entire plant body surface such as the foliage part and root part thereof. For example, when the application site is an above-ground part such as a foliage part, the plant disease control composition may be applied so as to come into direct contact with the application site. Examples of the direct contact include application, spraying, sprinkling, and immersion of the plant disease control composition to the application site. It is particularly desirable that the application is to a site of infection or at risk of infection of target plant with the target bacteria. Further, when the application site is an underground portion such as a root portion, it may be indirectly applied by being added to soil, or in a case of a culture medium, to the culture medium. The term “soil” used herein is not particularly limited as long as it is a soil in which a target plant can grow. Normally, a planting soil containing appropriate nutrients and having an appropriate pH value is utilized. The location of the soil is not critical. Further, the term “culture medium” refers to an artificially prepared culture medium for planting a target plant. The culture medium may be a solid culture medium such as an agar culture medium or may be a liquid culture medium. Examples of culture media include, for example, isolated beds, root-zone restricted pots or nursery beds. The composition of the culture medium may be a culture medium composition known in the art. It can be appropriately selected depending on the kind of plant and the like.

### 2-4. Target Plant

[0119] The type of the target plant of the plant disease control composition of one or more embodiments of the present invention is not particularly limited as long as it is a plant which may develop a plant disease caused by the target bacterium of one or more embodiments of the present invention. The target plant may be either an angiosperm or a gymnosperm. Further, the target plant may be a herbaceous plant or a woody plant. Particular examples of the target plant include agriculturally important plants, for example, crop plants such as grains, vegetables, and fruits, and floricultural plants. Specific examples include monocotyledons such as Poaceae plants (for example, rice, wheat, barley, corn, sugarcane, sorghum, kaoliang, turfgrass), Musaceae plants (for example, banana), Amaryllidaceae plants (for example, Welsh onion, common onion, garlic, garlic chives), Liliaceae plants (for example, lily, tulip). Also included are dicotyledons such as Brassicaceae plants (for example, cabbage, radish, napa cabbage, rapeseed), Asteraceae plants (for example, lettuce, burdock, chrysanthemum), Fabaceae plants (for example, soybean, peanut, pea, bean, lentil, chickpea, faba bean, licorice), Solanaceae plants (for example, tomato, eggplant, potato, tobacco, bell pepper, capsicum, and petunia), Rosaceae plants (for example, strawberry, apple, pear, peach, loquat, almond, plum, rose, Japanese apricot, and cherry), Cucurbitaceae plants (for example, cucumber, cucurbits, pumpkin, melon, and watermelon), Anacardiaceae plants (for example, mango, pistachio, and cashew nut), Lauraceae plants (for example, avocado), Rutaceae plants (for example, mandarin orange, grapefruit, lemon, and yuzu), Convolvulaceae plants (for example, sweet potato), Theaceae plants (for example, tea plant), and Vitaceae plants (for example, grape).

### 2-5. Target Plant Diseases

[0120] The target plant diseases to which the plant disease control composition of one or more embodiments of the present invention is applied include all plant diseases caused by the target bacteria of one or more embodiments of the present invention. Plant diseases caused by bacteria of the genus Xanthomonas are particularly targeted. Examples thereof include bacterial spot found in peaches and the like, bacterial blight found in walnuts and the like, bacterial pustule found in soybeans and the like, angular leaf spot found in strawberries and the like, bacterial blight found in tomato, bell peppers, lettuce and the like), black rot found in cabbage, napa cabbage, broccoli and the like), bacterial canker found in oranges grapefruits and the like), angular leaf spot found in cotton and the like), leaf blight found in rice, and the like.

### 3. Method for Controlling Plant Disease

### 3-1. Overview

[0121] A third aspect of one or more embodiments of the present invention is a method for controlling a plant disease. The method for controlling a plant disease of one or more embodiments of the present invention is characterized in that a plant disease of a target plant is controlled by applying the plant disease control composition according to the second aspect to the target plant.

[0122] According to the method for controlling a plant disease of one or more embodiments of the present invention, plant diseases caused by bacteria, particularly bacteria of the genus Xanthomonas, in a target plant can be controlled.

### 3-2. Method

[0123] The method for controlling a plant disease of one or more embodiments of the present invention comprises a contact step as an essential step.

[0124] The “contact step” is a step of bringing the plant disease control composition according to the second aspect into contact with a target plant. This step is basically in accordance with “2-3. Application method” for the plant disease control composition of the second aspect.

[0125] In one or more embodiments, the term “contact” means that the plant disease control composition is brought into contact with a target plant. More specifically, it means that the bacteriolytic agent according to the first aspect, which is an active ingredient of the plant disease control composition, i.e., a phage, is brought into contact with a plant body of a target plant, particularly a site infected with target bacteria or a site at risk of infection. The purpose of this step is to allow the phage, which is an active ingredient, to infect the target bacterium, whereby the target bacteria are lysed. As a result, an effect of controlling a plant disease caused by the target bacteria can be exhibited.

[0126] The contact may be either direct contact or indirect contact. In one or more embodiments, the direct contact means that the plant disease control composition is brought into direct contact with a predetermined site of a target plant. Specifically, for example, the direct contact means that the plant disease control composition in a liquid or gel form is applied to, sprayed to, scattered to, or used to immerse a plant body of a target plant. In this case, the plant is brought into contact mainly at a site such as a leaf, a flower, a fruit, a stem, a branch, and/or a trunk. On the other hand, in one or more embodiments, the indirect contact means that the plant disease control composition is brought into contact with a predetermined site of a target plant via a medium. For example, the indirect contact means that the plant disease control composition in a granular form is applied to the soil around the root of a target plant. The phage, which is an active ingredient, is transported through water or the like in the soil, and is absorbed through the root.

### 3-3. Effect

[0127] The phage, which is an active ingredient of the composition obtained by one or more embodiments of the present invention, can efficiently kill target bacteria, and thus is useful for preventing or suppressing diseases caused by the target bacteria. Disease can also be diagnosed by detecting and identifying the target bacterium based on its specific bacteriolytic activity. Examples of drugs conventionally used for bacteria of the genus Xanthomonas include copper agents and antibiotics, but these drugs may cause phytotoxicity or disruption of the bacterial flora balance. For example, several strains of Pseudomonas fluorescens have been demonstrated to have plant growth-promoting effects (Haas D., Defago G., Nature Reviews in Microbiology, 2005, 3 (4), 307-19), and it is highly likely that copper-based agents or antibiotic-based agents will also kill such bacteria symbiotic with plants. On the other hand, since the phage is an organism-derived substance, no manifestation of phytotoxicity has been reported, and since the specificity is high, the influence on the bacterial flora balance is extremely limited.

### 4. Method for Identifying Bacteria of Genus Xanthomonas

### 4-1. Overview

[0128] A fourth aspect of one or more embodiments of the present invention is a method for identifying bacteria of the genus Xanthomonas. The identification method of one or more embodiments of the present invention is characterized in that a bacterium of the genus Xanthomonas is identified by utilizing the host specificity of the phage constituting the bacteriolytic agent according to the first aspect.

[0129] According to one or more embodiments of the present invention, it is possible to determine and identify whether or not unidentified plant pathogenic bacteria causing a plant disease are bacteria of the genus Xanthomonas.

### 4-2. Method

[0130] The identification method of one or more embodiments of the present invention comprises a culturing step, a mixing step, a mixture-culturing step, and a determination step as essential steps, and further includes an isolation step as an optional step. Hereinafter, each step will be described.

### (1) Isolation Step

[0131] The “isolation step” is a step of isolating a test bacterium from a plant tissue affected by a plant disease. This step is an optional step and may be performed as necessary.

[0132] The term “test bacterium” refers to a plant pathogenic bacterium to be subjected to the method for identifying bacteria of the genus Xanthomonas according to the fourth aspect of one or more embodiments of the present invention, the species of which has not been identified.

[0133] The plant tissue may be any site of a plant where a plant disease has developed, but is particularly a site where symptoms of the plant disease are significantly observed. For example, in the case of a peach that has developed peach bacterial spot, a leaf showing the disease may be used.

[0134] In order to isolate test bacteria from a collected plant tissue, a specimen in which a disease is found may be immersed in a solvent such as water and extracted, and the specimen may be fragmented or crushed at the time of extraction. Subsequently, the extract may be streaked on an agar culture medium, and a single colony may be picked.

### (2) Culturing Step

[0135] The “culturing step” is a step of culturing the isolated test bacteria to obtain a culture. The test bacterium may be cultured by a method known in the art.

[0136] The “culture” is obtained by culturing a test bacterium, and may be either liquid or solid.

[0137] In this step, since the test bacteria are in an unidentified state, it is desirable to use a culture medium capable of widely culturing plant pathogenic bacteria as the culture medium used in this step. A culture medium capable of culturing at least bacteria of the genus Xanthomonas, which are identification target bacteria of one or more embodiments of the present invention, is used. Such a culture medium may be, for example, a culture medium containing one or more components selected from protein enzymatic decomposition products such as peptone and tryptone, biological extracts such as potato dextrose and yeast extract, amino acids such as glutamic acid or salts thereof, sugars such as glucose and sucrose, and inorganic salts such as sodium chloride, magnesium chloride, and potassium dihydrogen phosphate. Specific culture media and compositions include LB culture medium (tryptone, yeast extract, NaCl), YPG culture medium (yeast extract, peptone, glucose), PD culture medium (potato dextrose), Suwa culture medium supplemented with peptone (sucrose, glutamate, peptone) and the like.

[0138] The isolated test bacteria are inoculated into the culture medium and cultured under appropriate culture conditions. The culture can be obtained by culturing with stirring under a culture condition of, for example, 20 to 40° C., 20 to 30° C., 22 to 28° C., or 24 to 26° C. The culture time is not limited, and for example, the culture may be performed until the turbidity at a wavelength of 600 nm reaches about 1.0. By this step, a culture liquid of the test bacteria is obtained. The culture may be a multi-stage culture of two or more stages. For example, further culturing may be performed after a soft agar-containing liquid culture medium is added to a culture liquid obtained after culturing in a liquid culture medium, and the mixture is poured onto a solid culture medium such as an agar culture medium and solidified.

### (3) Mixing Step

[0139] The “mixing step” is a step of mixing the culture obtained in the culturing step with the bacteriolytic agent according to the first aspect to obtain a mixture.

[0140] The “mixture” is a mixture of the culture and the bacteriolytic agent, and may be a liquid or a solid.

[0141] The mixing method is not particularly limited as long as the culture and the bacteriolytic agent can be mixed. The bacteriolytic agent according to the first aspect may be administered in a solid state or in a liquid state in which it is suspended in water or a liquid culture medium.

[0142] When both the culture and the bacteriolytic agent are liquid, the volumetric ratio of culture to bacteriolytic agent may be 1:9, 2:8, 3:7, 4:6, 5:5, 6:4, 7:3, 8:2, or 9:1. After the administration, the culture and the bacteriolytic agent may be sufficiently mixed by stirring or the like. On the other hand, when a soft agar-containing liquid culture medium is laminated as described above, the culture is solid. In this case, the mixture may be obtained by dropping the bacteriolytic agent onto the solid culture medium like a gel surface to mix them on the solid culture medium.

### (4) Mixture-Culturing Step

[0143] The “mixture-culturing step” is a step of culturing the mixture under predetermined conditions.

[0144] When the mixture is cultured, a soft agar-containing liquid culture medium may be added to the mixture, and the mixture may be poured onto a solid culture medium such as an agar culture medium and solidified, followed by further culturing.

[0145] The basic procedure of this step is the same as that of the culturing step. In this step, it is desirable to perform culture based on the so-called plaque assay method so that the presence or absence of lysis of the test bacteria by the phage constituting the bacteriolytic agent can be easily confirmed in the determination step described below, although the method is not limited thereto. For example, a part of the liquid mixture may be mixed with a soft agar culture medium having the same composition, and then poured onto an agar culture medium having the same composition before the soft agar culture medium is solidified, and spread over the entire culture medium. Thereafter, the mixture may be cultured under the same conditions as in the culturing step.

### (5) Determination Step

[0146] The “determination step” is a step of determining that the test bacteria are bacteria of the genus Xanthomonas when the test bacteria after the culturing step are lysed.

[0147] The determination of the presence or absence of lysis is not limited. For example, when the determination is based on the plaque assay method, the determination may be made based on the presence or absence of plaque formation. When plaques are present in the soft agar culture medium which has been spread and solidified on the agar culture medium after the above-mentioned mixture-culturing step, it indicates that the test bacteria have been lysed by infection with the phage constituting the bacteriolytic agent of one or more embodiments of the present invention. Therefore, the test bacteria can be determined to be bacteria of the genus Xanthomonas. On the other hand, when the test bacteria proliferate on the entire agar culture medium and no plaques are present, it can be determined that the test bacteria are not bacteria of the genus Xanthomonas.

[0148] In order to perform more accurate determination, a negative control to be mixed with a culture medium not containing the bacteriolytic agent in the mixture-culturing step and/or a positive control using identified bacteria of the genus Xanthomonas in the culturing step instead of the test bacteria may be simultaneously prepared to confirm that no plaques are formed in the negative control and plaques are observed in the positive control.

### 4-3. Effect

[0149] According to the method for identifying bacteria of the genus Xanthomonas of one or more embodiments of the present invention, it is possible to identify whether or not a plant disease is caused by bacteria of the genus Xanthomonas.

[0150] Further, according to the method for identifying bacteria of the genus Xanthomonas of one or more embodiments of the present invention, it is possible to detect whether or not bacteria of the genus Xanthomonas are present in a lesion of a plant which has developed a plant disease which is presumed to be caused by bacteria of the genus Xanthomonas.

### EXAMPLES

### Example 1: Isolation of Novel Bacteriophages and Bacteriolytic Activity Thereof (1)

### (Objective)

[0151] To isolate a new bacteriophage having bacteriolytic activity against pathogenic bacteria of plant diseases and to verify the bacteriolytic activity against the pathogenic bacteria of the plant diseases.

(Methods and results)

### (1) Obtaining and Culturing Plant Pathogenic Bacteria

[0152] In this example, all of the target plant pathogenic bacteria were obtained from the National Agriculture and Food Research Organization (NARO). Each strain used in this Example is described in Table 2 together with the accession numbering of the National Agriculture and Food Research Organization.

TABLE 2

| | Species | Isolation | Collection |
|---|---|---|---|
| ID | name | source | location |
| MAFF No. | Xanthomonas arboricola | Peach | Yamanashi |
| 211971 | pv. pruni | | |
| MAFF No. | Xanthomonas arboricola | Peach | Fukushima |
| 311351 | pv. pruni | | |
| MAFF No. | Xanthomonas arboricola | Walnut | Nagano |
| 212146 | pv. juglandis | | |
| MAFF No. | Xanthomonas campestris | Tomato | Tokushima |
| 301256 | pv. vesicatoria | | |
| MAFF No. | Xanthomonas campestris | Lettuce | Wakayama |
| 301352 | pv. vitians | | |
| MAFF No. | Xanthomonas arboricola | Peach | Yamanashi |
| 311622 | pv. pruni | | |
| MAFF No. | Xanthomonas citri | Mandarin | Wakayama |
| 301078 | subsp. citri | | |
| NCIMB-ID | Pseudomonas fluorescens | Chicken egg | US |
| 10460 | | | |

[0153] As a control, an environmentally beneficial Pseudomonas fluorescens strain reported to have plant growth promoting effects was obtained from the NCIMB Institute in the UK National Culture Collection (UKNCC) (NCIMB-ID: 10460).

[0154] A liquid culture medium (YPG Broth) in which peptone (1 g), yeast extract (1 g), and glucose (2 g) were dissolved in H₂O (1 L) and autoclaved was used for culturing the bacteria of the genus Xanthomonas and the Pseudomonas fluorescens sp. In addition, as an agar culture medium, an agar culture medium obtained by adding 15 g agar per liter of the above Broth (YPG Broth) and autoclaving the mixture was used (referred to as “YPG Agar” when YPG Broth was used). Further, as a soft agar culture medium (Top Agar) to be laminated as an upper layer on the agar culture medium, Top Agar prepared by adding 5 g of agarose per liter of the above-mentioned Broth followed by autoclaving was stored at about 50° C. and used as required.

[0155] Each of the above-mentioned strains delivered in a dry powder state was suspended in Broth (0.1 mL), and then streaked and cultured on Agar (YPG Agar) at 25° C. to isolate a single colony. The isolated colony was inoculated into Broth and cultured with shaking at 25° C., and this was used as a preculture liquid. In the main culture, the preculture liquid was inoculated into Broth and cultured at 25° C. for 10 hours to 30 hours until the turbidity (optical density at 600 nm) reached about 1.0. The culture liquid after culturing was used as a bacterial liquid as it was.

### (2) Isolation and Purification of First Phage

[0156] The novel phage was isolated from natural sewage or soil obtained in Japan. The phage was isolated by a conventional plaque assay method. First, sewage from a pond, a lake, or the like, or sewage obtained by suspending soil in water was filtered through a 0.45 μm filter to prepare a phage-containing liquid. Subsequently, the bacterial liquid and the phage-containing liquid were mixed in equal amounts and allowed to stand at room temperature for about 10 minutes. The bacteria/phage liquid mixture (0.2 mL) was then added to Top Agar (3 mL), briefly mixed on a vortex mixer, and then poured onto Agar. After Top Agar was solidified, static culture was performed at 25° C. for about 12 hours. A lytic plaque was allowed to form on a lawn of the bacteria formed by the culture. Thereafter, the gel of the plaque portion was aspirated using a truncated tip, and a phage having bacteriolytic activity against the bacteria of the genus Xanthomonas was isolated. Then, the phage-containing liquid containing the isolated phage at a high concentration was used instead of the sewage, and this procedure was repeated to purify the phage.

[0157] A total of three kinds of novel phages were isolated from natural sewage and soil by a technique for detecting a lysis plaque formed on a soft agar culture medium in which any of the above-mentioned strains was amplified. One of the novel phages isolated in Example 1 is referred to as a “first phage”.

[0158] The isolated phage was suspended in SM Buffer and passed through a 0.2 μm filter to collect a phage-containing liquid. This phage-containing liquid was mixed with the above-mentioned bacterial liquid under the above-mentioned conditions, and the phage was isolated again. This procedure was repeated several times to further purify the phage. The composition of SM Buffer is shown in Table 3.

TABLE 3

| | | |
|---|---|---|
| SM Buffer | Final | Add to 1 L |

| | | | | |
|---|---|---|---|---|
| NaCl | 0.1 | M | 5.8 | g |
| Mg₂SO₄•7H₂O | 10 | mM | 1 | g |
| 1M Tris-HCl | 50 | mM | 50 | mL |
| pH 8.0 | | | | |

| | | | |
|---|---|---|---|
| Gelatin | 0.1% | 0.1 | g |

### (3) Amplification and Purification of First Phage

[0159] In order to amplify and purify the isolated and purified first phage, a plate lysate (PL) method which is an amplification method using a plaque assay method was performed. For formation of many plaques on Agar, the bacteria/phage liquid mixture was adjusted, mixed with Top Agar, and then spread and cultured on YPG Agar. Thereafter, SM Buffer (3 mL) was added onto Top Agar on which plaques were formed, and the mixture was shaken at 25° C. for about 30 minutes, and the supernatant was passed through a 0.2 μm filter to recover a recovery liquid containing the phage.

[0160] Purification of the first phage was carried out by adding PEG 6000 (1 g, final concentration: 10%) and NaCl (0.4 g, final concentration: 4%) to the recovered solution (10 mL) to dissolve the phage, and rotating the solution overnight at 4° C. using a rotator. Thereafter, the mixture was centrifuged at ×15,000 g at 4° C. for 60 minutes to remove the supernatant. The recovered pellet was resuspended in SM Buffer (0.5 mL). Subsequently, chloroform (0.5 mL) was added, and the mixture was vigorously stirred and allowed to stand on ice for 6 hours. After centrifugation at ×8,000 g at 4° C. for 10 minutes, the upper layer was carefully collected to obtain a purified phage liquid. The concentration of a purified phage liquid is generally represented by a titer [PFU/mL] based on the number of plaques (Plaque Forming Unit, PFU) by a plaque assay method, and serves as an indicator of bacteriolytic activity. The titer of the prepared purified first phage liquid was determined by a plaque assay method using appropriately diluted solutions, and a titer of 108 PFU/mL or higher was confirmed.

### (4) Host Range Evaluation of First Phage

[0161] The host range of the first phage was evaluated by a spot test method. The bacterial liquid (0.1 mL) alone was added to and mixed with Top Agar (3 mL), and the mixture was then poured onto Agar, spread over the entire plate, and solidified. As the bacterial liquid, in addition to the bacterial liquid of each bacterium of the genus Xanthomonas shown in Table 2 prepared in the above (1), a bacterial liquid of Pseudomonas fluorescens for control was also prepared. Then, about 5 μL of the purified phage liquid was dropped, followed by static culture at 25° C. for about 12 hours. When a portion on the plate on which the bacterial lawn was formed and at a place where the phage was dropped turned clear in the form of a circle (about 1 cm in diameter), it was determined that the dropped phage had bacteriolytic activity against the strain.

[0162] An example of the results is shown in FIGS. 1 and 2. When the first phage exhibits bacteriolytic activity, the bacterial lawn formed on the plate turns clear only in an area to which the purified phage liquid has been dropped. One type of the first phage obtained by one or more embodiments of the present invention exhibited bacteriolytic activity against all of the strains belonging to the three species of Xanthomonas arboricola (including pv. pruni and pv. juglandis), Xanthomonas campestris (including pv. vesicatoria and pv. vitians), and Xanthomonas citri shown in Table 2. On the other hand, it was also confirmed that it did not exhibit bacteriolytic activity against Pseudomonas fluorescens. There are reports of phages showing activity against two or more species of the genus Xanthomonas, but the above-mentioned pattern has not been reported (Nakayinga R. et al., BMC Microbiology, 2021, 21:291). This suggests that the first phage isolated exhibits broad bacteriolytic activity against bacteria of the genus Xanthomonas.

[0163] This is a result showing the possibility that the first phage can be applied to various plant diseases. For example, the first phage is suggested to be useful for controlling peach bacterial spot, walnut bacterial blight, tomato bacterial blight, lettuce bacterial blight, mandarin orange bacterial canker and the like, which are caused by bacteria of the genus Xanthomonas, and the first phage is also expected to have a high value in industrial utilization.

### (5) Genomic Analysis of First Phage

[0164] The genomic DNA sequence was determined and analyzed for the first phage.

### (i) Preparation and Sequencing of Genomic DNA of First Phage

[0165] The genome of the first phage was extracted using a TURBO DNA-Free™ kit (Thermo Fisher Scientific Inc.). The genomic DNA derived from the host bacterium as a contaminant was removed by the treatment according to the manual attached to the kit. Thereafter, phage coat molecules were degraded by the proteinase K treatment using NucleoSpin® Virus (Machery-Nagel) in accordance with the attached manual. A genomic DNA solution of the first phage was prepared through genomic DNA purification using a silica spin column. Thereafter, the concentration of the genomic DNA was measured using Qubit dsDNA HS Assay kit (Thermo Fisher Scientific Inc.), and 50 μL of genomic DNA solutions were prepared so as to have a final concentration of 0.2 ng/μL. Next, using Nextera XT DNA Library Prep (Illumina), fragmentation of the genome of the first phage and addition of adaptor sequences by PCR were performed by a treatment according to the attached manual. Next, electrophoresis was performed on Bioanalyzer (Agilent Technologies) using Agilent High Sensitivity DNA Kit (Agilent Technologies), and the average bp size of the sample was measured to determine the concentration of DNA fragments. Finally, a measurement sample was prepared by a treatment using a Miseq Reagent kit (Illumina) according to the attached manual, and measurement was performed using a next-generation sequencer Miseq (Illumina). The obtained data were subjected to preprocessing (trimming and the like) using CLC genomics workbench (Qiagen). Then, de novo assembly was performed to obtain a contig sequence corresponding to the genome sequence of the phage.

### (ii) Bioinformatics Analysis Based on Genomic Sequence Information

[0166] Based on the base sequence (SEQ ID NO: 1) of the genomic DNA of the first phage obtained in (i) above, a search for similar DNA sequences and confirmation of sequence identity were performed using the BLAST server (https://blast.ncbi.nlm.nih.gov/Blast.cgi) provided by NCBI. When a range of 90% or more of the entire length (Query Cover) was searched for known sequences having a high sequence identity, the sequence having the highest numerical value of sequence identity was the genomic DNA sequence of Pseudomonas phage vB_Pae_TR (accession code: OL802211.1), and had a sequence identity of 99.07% over a range of 93% of the entire length of SEQ ID NO: 1.

[0167] The sequence identity is a numerical value for a range automatically aligned by the analysis server with respect to the entire length of the genome of the first phage. The numerical value in the range is indicated as Query Cover, and the sequence identity of 99.07% of vB_Pae_TR is a numerical value calculated by limiting to a region of 93% of the entire length of ΦX-33. Thus, a sequence identity over the entire length is difficult to calculate, but is at least estimated to be less than 99.07%, and usually equal to or less than 93%.

[0168] It was revealed that the target bacterium of the phage vB_Pae_TR having the genome of the known sequence is a bacterium of the genus Pseudomonas. Therefore, it can be said that it was difficult to identify the target bacterium of the first phage isolated in this Example based on the sequence identity with the genome sequence of a known phage. At the same time, it is considered that a phage having a higher sequence identity to the full length than vB_Pae_TR (a phage showing a higher sequence identity over a wider range) is highly likely to be a phage having a host range similar to that of the first phage isolated in the present Example, that is, a phage using various bacteria of the genus Xanthomonas as host bacteria.

[0169] From the above results, it was suggested that the first phage is a completely novel phage having a host range of the genus Xanthomonas which has not been reported so far.

### Example 2: Isolation of Novel Bacteriophage and Bacteriolytic Activity Thereof (2)

### (Objective)

[0170] To isolate a new bacteriophage having bacteriolytic activity against pathogenic bacteria of plant diseases and to verify the bacteriolytic activity against the pathogenic bacteria of the plant diseases.

### (Methods and Results)

### (1) Obtaining and Culturing Plant Pathogenic Bacteria

[0171] In this Example, plant pathogenic bacteria as target bacteria were bacteria of the genus Xanthomonas, and all the strains were obtained from the National Agriculture and Food Research Organization (NARO). The strains used in Examples 7 and 8 are described in Table 4 together with the accession numbering (MAFF Nos.) of the National Agriculture and Food Research Organization.

TABLE 4

| | Species | Isolation | Collection |
|---|---|---|---|
| ID | name | source | location |
| MAFF No. | Xanthomonas arboricola | Peach | Yamanashi |
| 311622 | pv. pruni | | |
| MAFF No. | Xanthomonas arboricola | Walnut | Nagano |
| 212146 | pv. juglandis | | |
| MAFF No. | Xanthomonas campestris | Lettuce | Wakayama |
| 301352 | pv. vitians | | |
| MAFF No. | Xanthomonas campestris | Fescue | Ibaraki |
| 106642 | pv. campestris | | |
| MAFF No. | Xanthomonas campestris | Tomato | Iwate |
| 730097 | pv. vesicatoria | | |
| MAFF No. | Xanthomonas arboricola | Walnut | Nagano |
| 212147 | pv. juglandis | | |
| MAFF No. | Xanthomonas arboricola | Walnut | Nagano |
| 212148 | pv. juglandis | | |
| MAFF No. | Xanthomonas arboricola | Walnut | Nagano |
| 212149 | pv. juglandis | | |
| MAFF No. | Xanthomonas campestris | Tomato | Tokushima |
| 301256 | pv. vesicatoria | | |
| MAFF No. | Xanthomonas campestris | Tomato | Shizuoka |
| 301294 | pv. vesicatoria | | |
| MAFF No. | Xanthomonas campestris | Tomato | Tokushima |
| 301257 | pv. vesicatoria | | |
| MAFF No. | Xanthomonas campestris | Bell pepper | Tokushima |
| 301260 | pv. vesicatoria | | |
| MAFF No. | Xanthomonas campestris | Lettuce | Nagano |
| 301356 | pv. vitians | | |
| MAFF No. | Xanthomonas campestris | Lettuce | Chiba |
| 301354 | pv. vitians | | |
| MAFF No. | Xanthomonas campestris | Lettuce | Fukuoka |
| 301358 | pv. vitians | | |
| NCIMB-ID | Pseudomonas fluorescens | Chicken egg | US |
| 10460 | | | |

[0172] As a control, a strain of Pseudomonas fluorescens, which is a bacterium of the genus Pseudomonas, was obtained from the Institute NCIMB in the UK National Culture Collection (UKNCC) (NCIMB-ID: 10460).

[0173] The bacteria of the genus Xanthomonas and Pseudomonas fluorescens were cultured according to the method described in “(1) Obtaining and culturing plant pathogenic bacteria” in Example 1.

### (2) Isolation of the Second Phage and Purification Thereof

[0174] The novel phage was isolated from natural sewage or soil obtained in Japan. The isolation method and the purification method were in accordance with the methods described in “(2) Isolation and purification of first phage” in Example 1. As a result, one novel phage was isolated from natural sewage or soil. The novel phage isolated in Example 2 is referred to as a “second phage”.

[0175] The isolated phage was suspended in SM Buffer and passed through a 0.2 μm filter to collect a phage-containing liquid. This phage-containing liquid was mixed with the above-mentioned bacterial liquid under the above-mentioned conditions, and the phage was isolated again. This procedure was repeated several times to purify the phage.

### (3) Amplification and Purification of Second Phage

[0176] In order to amplify and purify the isolated and purified second phage, a plate lysate (PL) method was performed. The specific method was in accordance with the method described in “(3) Amplification and purification of phage” in Example 1. The titer of the prepared purified second phage liquid was determined by a plaque assay method using appropriately diluted solutions, and was confirmed to be 108 PFU/mL or higher.

### (4) Host Range Evaluation of Second Phage

[0177] The host range of the second phage was evaluated by a spot test method. The basic operation was in accordance with the method described in “(4) Evaluation of host range of first phage” in Example 1.

[0178] An example of the results is shown in FIGS. 3 and 4. When the second phage exhibits bacteriolytic activity, the bacterial lawn formed on the plate turns clear only in an area to which the purified phage liquid has been dropped. The second phage obtained by one or more embodiments of the present invention exhibited bacteriolytic activity against all of the bacteria of the genus Xanthomonas shown in Table 4. On the other hand, the second phage did not exhibit bacteriolytic activity against Pseudomonas fluorescens. A phage exhibiting a broad bacteriolytic activity against all bacterial species and pathovars as shown in Table 4 has not been known so far. This suggests that the isolated second phage exhibits a broad bacteriolytic activity against bacteria of the genus Xanthomonas.

[0179] Similarly to the first phage, the second phage is also highly likely to be applicable to various plant diseases. This result suggests that the second phage is useful for controlling, for example, peach bacterial spot, walnut bacterial blight, tomato bacterial blight, lettuce bacterial blight, and the like caused by bacteria of the genus Xanthomonas.

### (5) Genomic Analysis of Second Phage

[0180] The genomic DNA sequence was determined and analyzed for the second phage.

### (i) Preparation and Sequencing of Genomic DNA of Second Phage

[0181] The genome of the second phage was extracted using a TURBO DNA-Free™ kit (Thermo Fisher Scientific). The basic operation was in accordance with the method described in “(5) Genomic analysis of first phage, (i) Preparation and sequencing of genomic DNA of first phage” in Example 1.

### (ii) Bioinformatics Analysis Based on Genomic Sequence Information

[0182] Based on the base sequence (SEQ ID NO: 2) of the genomic DNA of the second phage obtained in (i) above, a search for similar DNA sequences and confirmation of sequence identity were performed using the BLAST server provided by NCBI. As a result of the search, a partial sequence of the genomic DNA of a phage targeting a bacterium of the genus Xanthomonas (accession code: MT664984.1), which is called Xp12, had the highest similarity score, and had a sequence identity of 99.03% over a range of 99% of the entire length of SEQ ID NO: 2. From this result, the sequence identity to the full length of SEQ ID NO: 2 is estimated to correspond to a numerical value of about 98.04%. However, only Xanthomonas oryzae is known as a bacterial species against which the phage Xp12 exhibits bacteriolytic activity (Nakayinga R. et al., BMC Microbiology, 2021, 21:291).

[0183] The total length of the genomic DNA sequence of Xp12 is 63,783 bases, whereas the total length of the genomic DNA sequence of the second phage isolated in this Example was 35,321 bases, which was about a half of the total length of the genomic DNA sequence of Xp12. As a result, contrary to the above, when the sequence identity based on the genomic DNA sequence of Xp12 was calculated using GENETYX-NGS included in the genetic information processing software GENETYX (https://www.genetyx.co.jp/), the base sequence (SEQ ID NO: 2) of the genomic DNA of the second phage had a sequence identity of 98.34% over a range of 54% of the entire length of the genomic DNA sequence of Xp12. From this result, it was estimated that the sequence identity between the full-length genomic DNA sequences of both phages was about 53.10%. Therefore, the genomic DNA sequence of the second phage obtained in this Example has only a sequence homologous to a part of the genomic DNA sequence of Xp12, and it cannot be said that the degree of similarity is high as a whole.

[0184] These differences in the genomic DNA sequences were further analyzed by comparing the genomic DNA sequences of Xp 12 and the phage of one or more embodiments of the present invention using MUMmer included in genetic information processing software GENETYX (https://www.genetyx.co.jp/). As a result, a sequence homologous to the region from 12,894 to 41,320 of the genomic DNA sequence of Xp12 was not detected in the base sequence of SEQ ID NO: 2, and it was found that the region was deleted in the genomic DNA sequence of the second phage. The region contained a gene presumed to be a tail fiber gene based on the sequence identity (accession code: QNN97189.1), a tail fiber gene (accession code: QNN97196.1), and an endolysin gene (accession code: QNN97201.1). These genes are deeply involved in the process of infection of a host. Also from this point of view, it was suggested that the second phage was largely different from Xp12 in form and properties, and this difference led to the difference in host range. In addition, there were phages having a base sequence with a relatively high similarity score to the base sequence of SEQ ID NO: 2, but all of them had a full length of more than 60,000 bases as in the case of the genomic DNA sequence of Xp12, and were phages having a high similarity score to the full length of the genomic DNA sequence of Xp12.

[0185] The search range was further expanded to search for sequences having a sequence identity of 80% or more over a range of 80% or more of the entire length (Query Cover) with respect to the genomic DNA sequence of the second phage. However, a known sequence having a high similarity score with respect to the genomic DNA sequence of the second phage and having a total genomic DNA sequence length of 60,000 bases or less was not detected on the BLAST server provided by NCBI.

[0186] From the above, it was suggested that the second phage was a completely novel phage whose properties were changed by deletion of a part of its genomic DNA.

### Example 3: Isolation of Novel Bacteriophage and Bacteriolytic Activity Thereof (3)

### (Objective)

[0187] To isolate a new bacteriophage having bacteriolytic activity against pathogenic bacteria of plant diseases and to verify the bacteriolytic activity against the pathogenic bacteria of the plant diseases.

### (Methods and Results)

### (1) Obtaining and Culturing Plant Pathogenic Bacteria

[0188] In this example, the plant pathogenic bacteria were bacteria of the genus Xanthomonas, and all strains were obtained from the National Agriculture and Food Research Organization (NARO). Each strain used in this Example is described in Table 5 together with the accession numbering (MAFF No.) of the National Agriculture and Food Research Organization.

TABLE 5

| | Species | Isolation | Collection |
|---|---|---|---|
| ID | name | source | location |
| MAFF No. | Xanthomonas arboricola | Walnut | Nagano |
| 212146 | pv. juglandis | | |
| MAFF No. | Xanthomonas arboricola | Walnut | Nagano |
| 212147 | pv. juglandis | | |
| MAFF No. | Xanthomonas campestris | Tomato | Shizuoka |
| 301294 | pv. vesicatoria | | |
| MAFF No. | Xanthomonas campestris | Tomato | Tokushima |
| 301257 | pv. vesicatoria | | |
| MAFF No. | Xanthomonas campestris | Cabbage | Ibaraki |
| 106692 | pv. campestris | | |
| MAFF No. | Xanthomonas campestris | Broccoli | Ibaraki |
| 106765 | pv. campestris | | |
| MAFF No. | Xanthomonas campestris | Lettuce | Gunma |
| 301359 | pv. vitians | | |
| NCIMB-ID | Pseudomonas fluorescens | Chicken egg | US |
| 10460 | | | |

[0189] As a control, a strain of Pseudomonas fluorescens, which is a bacterium of the genus Pseudomonas, was obtained from the Institute NCIMB in the UK National Culture Collection (UKNCC) (NCIMB-ID: 10460).

[0190] The bacteria of the genus Xanthomonas and Pseudomonas fluorescens were cultured according to the method described in “(1) Obtaining and culturing plant pathogenic bacteria” in Example 1.

### (2) Isolation of Third Phage and Purification Thereof

[0191] The novel phage was isolated from natural sewage or soil obtained in Japan. The isolation method and the purification method were in accordance with the methods described in “(2) Isolation and purification of first phage” in Example 1. As a result, one novel phage was isolated from natural sewage or soil. The novel phage isolated in Example 3 is referred to as a “third phage”.

[0192] The isolated phage was suspended in SM Buffer and passed through a 0.2 μm filter to collect a phage-containing liquid. This phage-containing liquid was mixed with the above-mentioned bacterial liquid under the above-mentioned conditions, and the phage was isolated again. This procedure was repeated several times to purify the phage.

### (3) Amplification and Purification of Third Phage

[0193] In order to amplify and purify the isolated and purified third phage, a plate lysate (PL) method was performed. The specific method was in accordance with the method described in “(3) Amplification and purification of phage” in Example 1. The titer of the prepared purified third phage liquid was determined by a plaque assay method using appropriately diluted solutions, and was confirmed to be 108 PFU/mL or higher.

### (4) Host Range Evaluation of Third Phage

[0194] The host range of the third phage was evaluated by a spot test method. The basic operation was in accordance with the method described in “(4) Evaluation of host range of first phage” in Example 1.

[0195] An example of the results is shown in FIG. 5. When the third phage exhibits bacteriolytic activity, the bacterial lawn formed on the plate turns clear only in an area to which the purified phage liquid has been dropped. The third phage obtained by one or more embodiments of the present invention exhibited bacteriolytic activity against all of the bacteria of the genus Xanthomonas shown in Table 5. On the other hand, the third phage did not exhibit bacteriolytic activity against Pseudomonas fluorescens. A phage which exhibits broad bacteriolytic activity against all bacterial species and pathovars as shown in Table 5 has not been known so far. This suggests that the isolated third phage exhibits broad bacteriolytic activity against bacteria of the genus Xanthomonas.

[0196] In addition, this result suggests that the third phage is useful for controlling walnut bacterial blight, tomato bacterial blight, lettuce bacterial blight, broccoli black rot, and the like, which are caused by bacteria of the genus Xanthomonas.

### (5) Genomic Analysis of Third Phage

[0197] The genomic DNA sequence was determined and analyzed for the third phage.

### (i) Preparation and Sequencing of Genomic DNA of Third Phage

[0198] The genome of the third phage was extracted using a TURBO DNA-Free™ kit (Thermo Fisher Scientific). The basic operation was in accordance with the method described in “(5) Genomic analysis of first phage, (i) Preparation and sequencing of genomic DNA of first phage” in Example 1.

### (ii) Bioinformatics Analysis Based on Genomic Sequence Information

[0199] Based on the base sequence (SEQ ID NO: 3) of the genomic DNA of the third phage obtained in (i) above, a search for similar DNA sequences and confirmation of sequence identity were performed using the BLAST server provided by NCBI. As a result of the search, the genomic DNA sequence of a phage (accession code: OK490494.1) targeting a bacterium of the genus Stenotrophomonas called vB_SmaS_P15 had the highest similarity score, and the sequence identity was 85.20% (Query Cover: 96.82% sequence identity over a range of 88% of the entire length of SEQ ID NO: 3). From this result, it is estimated that the sequence identity to the full length corresponds to a numerical value of about 85.20%. Similarly, a known phage having the second highest genomic DNA sequence identity (phage name: BUCT598, accession code: MW831865.1, sequence identity to the full length: about 85.18%) and known phages having the third highest genomic DNA sequence identity (phage names: BUCT703 and BUCT700, accession codes: OM735688.1 and OM735686.1, respectively, sequence identity to the full length: about 56.7% for both) each targeted bacteria of the genus Stenotrophomonas.

[0200] This result suggested that the third phage is a completely novel phage whose hosts are bacteria of the genus Xanthomonas.

### Example 4: Bacteriolytic Activity of Combination of Obtained Bacteriophages (1)

### (Objective)

[0201] To verify the effect of a novel bacteriophage, which has been shown to have bacteriolytic activity against pathogenic bacteria of plant diseases when used alone, on plant diseases when used in combination.

### (Method)

### (1) Spot Test Method

[0202] A spot test was performed in accordance with the method described in “(4) Evaluation of host range of first phage” in Example 1. In this example, strains of Xanthomonas cucurbitae (MAFF No. 673005) and Xanthomonas campestris pv. vitians (MAFF No. 301352), against which all the phages tested had been confirmed to exhibit bacteriolytic activity, were used.

[0203] As the purified phage liquids to be dropped, mixed solutions obtained by mixing equal amounts of the purified phage liquids prepared in Examples were used. Each mixed solution was prepared by appropriate dilution so that the total titer was equivalent to that in the case of single use. The phages used in this Example were as follows.

[0204] In this Example, the first phage having the genomic DNA sequence of SEQ ID NO: 1 (a in FIG. 6B) was used in combination with a phage having the genomic DNA sequence of SEQ ID NO: 4 (b in FIG. 6B), a phage having the genomic DNA sequence of SEQ ID NO: 5 (c in FIG. 6B), a phage having the genomic DNA sequence of SEQ ID NO: 6 (d in FIG. 6B), a phage having the genomic DNA sequence of SEQ ID NO: 7 (e in FIG. 6B), the second phage having the genomic DNA sequence of SEQ ID NO: 2 (f in FIG. 6B), the third phage having the genomic DNA sequence of SEQ ID NO: 3 (g in FIG. 6B), and a phage having the genomic DNA sequence of SEQ ID NO: 8 (h in FIG. 6B).

### (Results)

[0205] An example of the results is shown in FIG. 6. When a phage combination exhibits bacteriolytic activity, the bacterial lawn formed on the plate turns clear only in an area to which the purified phage liquid has been dropped. It was found that all the combinations of two phages tested exhibited at least as much bacteriolytic activity as each phage used alone (FIG. 6).

[0206] From the above results, it was confirmed that the phage of one or more embodiments of the present invention is useful when used alone or in combination.

### Example 5: Bacteriolytic Activity of Combination of Obtained Bacteriophages (2)

### (Objective)

[0207] To verify the effect of a novel bacteriophage, which has been shown to have bacteriolytic activity against pathogenic bacteria of plant diseases when used alone, on plant diseases when used in combination.

### (Method)

### (1) Spot Test Method

[0208] A spot test was performed in accordance with the method described in “(4) Evaluation of host range of first phage” in Example 1. In this example, strains of Xanthomonas cucurbitae (MAFF No. 673005) and Xanthomonas campestris pv. vitians (MAFF No. 301352), against which all the phages tested had been confirmed to exhibit bacteriolytic activity, were used.

[0209] As the purified phage liquids to be dropped, mixed solutions obtained by mixing equal amounts of the purified phage liquids prepared in Examples were used. Each mixed solution was prepared by appropriate dilution so that the total titer was equivalent to that in the case of single use. The phages used in this Example were as follows.

[0210] In this Example, the second phage having the genomic DNA sequence of SEQ ID NO: 2 (a in FIG. 7B) was used in combination with the phage having the genomic DNA sequence of SEQ ID NO: 4 (b in FIG. 7B), the phage having the genomic DNA sequence of SEQ ID NO: 5 (c in FIG. 7B), the phage having the genomic DNA sequence of SEQ ID NO: 6 (d in FIG. 7B), the phage having the genomic DNA sequence of SEQ ID NO: 7 (e in FIG. 7B), the first phage having the genomic DNA sequence of SEQ ID NO: 1 (f in FIG. 7B), the third phage having the genomic DNA sequence of SEQ ID NO: 3 (g in FIG. 7B), and the phage having the genomic DNA sequence of SEQ ID NO: 8 (h in FIG. 7B).

### (Results)

[0211] An example of the results is shown in FIG. 7. When a phage combination exhibits bacteriolytic activity, the bacterial lawn formed on the plate turns clear only in an area to which the purified phage liquid has been dropped. It was found that all the combinations of two phages tested exhibited at least as much bacteriolytic activity as each phage used alone (FIG. 7).

[0212] From the above results, it was confirmed that the phage of one or more embodiments of the present invention is useful when used alone or in combination.

### Example 6: Bacteriolytic Activity of Combination of Obtained Bacteriophages (3)

### (Objective)

[0213] To verify the effect of a novel bacteriophage, which has been shown to have bacteriolytic activity against pathogenic bacteria of plant diseases when used alone, on plant diseases when used in combination.

### (Method)

### (1) Spot Test Method

[0214] A spot test was performed in accordance with the method described in “(4) Evaluation of host range of first phage” in Example 1. In this Example, strains of Xanthomonas cucurbitae (MAFF No. 673005), Xanthomonas campestris pv. vesicatoria (MAFF No. 301257) and Xanthomonas campestris pv. campestris (MAFF No. 106765), against which all the phages tested had been confirmed to exhibit bacteriolytic activity, were used.

[0215] As the purified phage liquids to be dropped, mixed solutions obtained by mixing equal amounts of the purified phage liquids prepared in Examples were used. Each mixed solution was prepared by appropriate dilution so that the total titer was equivalent to that in the case of single use. The phages used in this Example were as follows.

[0216] In this Example, the third phage having the genomic DNA sequence of SEQ ID NO: 3 (a in FIG. 8B) was used in combination with the phage having the genomic DNA sequence of SEQ ID NO: 4 (b in FIG. 8B), the phage having the genomic DNA sequence of SEQ ID NO: 5 (c in FIG. 8B), the phage having the genomic DNA sequence of SEQ ID NO: 6 (d in FIG. 8B), the phage having the genomic DNA sequence of SEQ ID NO: 7 (e in FIG. 8B), the first phage having the genomic DNA sequence of SEQ ID NO: 1 (f in FIG. 8B), the second phage having the genomic DNA sequence of SEQ ID NO: 2 (g in FIG. 8B), and the phage having the genomic DNA sequence of SEQ ID NO: 8 (h in FIG. 8B).

### (Results)

[0217] An example of the results is shown in FIG. 8. When a phage combination exhibits bacteriolytic activity, the bacterial lawn formed on the plate turns clear only in an area to which the purified phage liquid has been dropped. It was found that all the combinations of the two phages tested exhibited at least as much bacteriolytic activity as each phage used alone (FIG. 8).

[0218] From the above results, it was confirmed that the phage of one or more embodiments of the present invention is useful when used alone or in combination.

### Example 7: Test for Disease Control Effect on Tomato Bacterial Blight

### (Objective)

[0219] To verify the effect of an isolated novel bacteriophage having bacteriolytic activity against pathogenic bacteria of plant diseases on a plant disease when applied to a plant.

### (Method)

### (1) Preparation of Phage Spray Liquids

[0220] The phage spray liquid used in this test was prepared by the following procedure. First, a bacterial culture liquid of host bacteria for phage amplification was prepared by the following procedure. The host used was Xanthomonas campestris pv. vesicatoria (MAFF No. 301256), a strain against which all the phages tested had been confirmed to exhibit bacteriolytic activity. The bacterial cells were inoculated into YPG Broth and incubated overnight in a shaker set at 25° C. After the incubation, OD₆₀₀ (turbidity at a wavelength of 600 nm) was measured, and one having an OD₆₀₀ of about 1.0 was used as a bacterial culture liquid in the following.

[0221] A liquid mixture obtained by mixing equal amounts of the prepared bacterial culture liquid and the purified phage liquid (having a titer of about 108 PFU/mL) containing one kind of phage prepared in Example 1 was inoculated into a 100-fold amount of YPG culture liquid, and incubated in a shaker set at 25° C. for about 8 to 12 hours, and the obtained culture liquid was recovered as a phage crude solution. To the recovered crude liquid, a 1/10 volume of chloroform was added, and after vigorous stirring, the mixture was centrifuged at ×8,000 g at 20° C. for 5 minutes, and the supernatant was collected. The collected supernatant was passed through a 0.2 μm filter, and the filtrate was used as a purified phage liquid.

[0222] As a phage spray liquid containing one kind of phage, a liquid obtained by diluting the purified phage liquid with sterilized tap water to have a titer of about 109 PFU/mL was used.

### (2) Preparation of Bacterial Spray Liquids

[0223] The bacterial culture liquid prepared in (1) was used for the preparation of the bacterial spray liquid used for the treatment of plant infection in this test. A bacterial culture liquid diluted about 10,000 times with sterilized tap water was applied to a YPG Agar plate and incubated in an incubator set at 25° C. for about 1 to 3 days. The colonies on the YPG Agar plate were suspended in sterilized tap water, and collected to obtain a bacterial suspension. The bacterial suspension was diluted with sterilized tap water to have a final OD₆₀₀ of about 0.5 to prepare a bacterial spray liquid.

### (3) Plant Specimens

[0224] Commercially available tomato seeds were sowed and grown in a greenhouse, and seedlings having 50 or more leaves were used as specimens for evaluation.

### (4) Phage Application and Infection Treatment

[0225] In a phage application group, the phage spray liquid was foliar sprayed to each specimen twice before and after the bacterial infection treatment twice at an interval of 2 to 3 days, and after 2 to 3 days, the bacterial spray liquid was foliar sprayed to infect the specimen with the bacteria. The specimens infected with the bacteria were allowed to stand in a high-humidity plastic greenhouse for about 2 days after the infection treatment. Thereafter, the phage spray liquid was foliar sprayed twice at an interval of 2 to 3 days. The untreated group was treated in the same manner as described above, except that sterilized tap water was used instead of the purified phage liquid.

### (5) Determination of Incidence Rate

[0226] After 16 days from the infection treatment, the incidence rate was examined in the untreated group and each phage-sprayed group.

[0227] Leaves having a leaf surface on which a characteristic of tomato bacterial blight appeared were determined as diseased leaves, and the ratio of the number of diseased leaves to the total number of leaves was calculated as an incidence rate. The relative incidence rate of the phage-applied group was calculated as a relative value where the incidence rate of the untreated group was taken as 100%.

### (Results)

[0228] The results are shown in FIG. 9. The incidence rate in the untreated group was about 25%. On the other hand, the relative incidence rate was about 51.1% when the phage spray liquid containing the first phage was applied, with the incidence rate of the untreated group taken as 100%.

[0229] From the above, it was found that the phage of one or more embodiments of the present invention can effectively control a disease of a plant also when applied to the actual plant.

[0230] In the phage-applied group, there was no significant adverse effect on the plant considered to be caused by the phage, such as phytotoxicity on the leaves. From these results, it was found that the application of one or more embodiments of the phage of the present invention has few side effects and is an effective disease control means.

### Example 8: Test for Disease Control Effect on Broccoli Black Rot

### (Objective)

[0231] To verify the effect of an isolated novel bacteriophage having bacteriolytic activity against pathogenic bacteria of plant diseases on a plant disease when applied to a plant.

### (Method)

### (1) Preparation of Phage Spray Liquids

[0232] Phage spray liquids were prepared as described in Example 7, except that the bacteria used as the bacterial cells were Xanthomonas campestris pv. campestris (MAFF No. 106765), and the following phages were used.

[0233] As the phage spray liquids containing a plurality of types of phage, those obtained by mixing equal amounts of purified phage liquids adjusted to have titers of the same order and diluting the mixtures with sterilized tap water to have titers of about 109 PFU/mL were used.

[0234] In this Example, the third phage having the genomic DNA sequence of SEQ ID NO: 3 (a in FIG. 10) was used in combination with a phage having the genomic DNA sequence of SEQ ID NO: 9 (b in FIG. 10), or additionally with the phage having the genomic DNA sequence of SEQ ID NO: 8 (c in FIG. 10) and a phage having the genomic DNA sequence of SEQ ID NO: 10 (d in FIG. 10), or additionally with the phage having the genomic DNA sequence of SEQ ID NO: 5 (e in FIG. 10), the phage having the genomic DNA sequence of SEQ ID NO: 6 (f in FIG. 10), the phage having the genomic DNA sequence of SEQ ID NO: 7 (g in FIG. 10) and a phage having the genomic DNA sequence of SEQ ID NO: 11 (h in FIG. 10).

### (2) Preparation of Bacterial Spray Liquids

[0235] Phage spray liquids were prepared as described in Example 7, except that the bacterial cells were the bacteria described above.

### (3) Plant Specimens

[0236] Commercially available broccoli seeds were sowed and grown in a greenhouse, and seedlings having 5 or more leaves were used as specimens for evaluation.

### (4) Phage Application and Infection Treatment

[0237] Phage application and infection treatment were carried out as described in Example 7.

### (5) Determination of Incidence Rate

[0238] The determination was carried out as described in Example 7, except that the evaluation was carried out 16 days after the infection treatment.

### (Results)

[0239] The results are shown in FIG. 10. The incidence rate in the untreated group was about 52%. On the other hand, the relative incidence rate where the incidence rate of the untreated group was taken as 100% was about 56% when the phage spray liquid containing only the third phage alone was applied (“a” in FIG. 10).

[0240] Further, when phage spray liquids containing two or more kinds of phage were applied, the relative incidence rates were further reduced to about 45.7% on average. The relative incidence rate was about 60% when one type of phage was used in combination with the third phage (a total of two types) (“a/b” in FIG. 10), but in general, the disease control effect tended to be higher and the relative incidence rate tended to be lower as the number of types combined increased. To be specific, the relative incidence rate in the case of combining a total of four kinds was about 43.5% (“a/b/c/d” in FIG. 10), and the relative incidence rate in the case of combining a total of eight kinds was about 33.5% (“a/b/c/d/e/f/g/h” in FIG. 10).

[0241] From the above, it was found that the phage of one or more embodiments of the present invention can effectively control a disease of a plant regardless of the kind of the plant itself even when applied to an actual plant. In addition, it was found that a higher effect can be obtained by applying the phage of one or more embodiments of the present invention in combination.

[0242] In the phage-applied group, there was no significant adverse effect on the plant considered to be caused by the phage, such as phytotoxicity on the leaves. From these results, it was found that the application of one or more embodiments of the phage of the present invention has few side effects and is an effective disease control means.

[0243] All publications, patents and patent applications cited herein are incorporated herein by reference in their entirety.

### SEQUENCE LISTING

[0244] B230189 Sequence.xml

1. A method for controlling a plant disease, comprising contacting a bacteriophage to a target plant.

2. The method according to claim 1, wherein the bacteriophage has a genomic DNA sequence comprising a base sequence shown in SEQ ID NO: 1.

3. The method according to claim 1, wherein the bacteriophage has a genomic DNA sequence comprising a base sequence shown in SEQ ID NO: 2.

4. The method according to claim 1, wherein the bacteriophage has a genomic DNA sequence comprising a base sequence shown in SEQ ID NO: 3.

5. The method according to claim 2, wherein the bacteriophage is bacteriolytic against a bacterium of genus Xanthomonas.

6. The method according to claim 3, wherein the bacteriophage is bacteriolytic against a bacterium of genus Xanthomonas.

7. The method according to claim 4, wherein the bacteriophage is bacteriolytic against a bacterium of genus Xanthomonas.

8. The method according to claim 1, wherein the bacteriophage is contained in a plant disease control composition.

9. The method according to claim 8, wherein the plant disease control composition comprises another bacteriophage exhibiting bacteriolytic activity against a bacterium of genus Xanthomonas.

10. A method for identifying a bacterium of genus Xanthomonas, comprising:
culturing a test bacterium isolated from a plant tissue affected by a plant disease to obtain a culture;
mixing the culture with a bacteriophage to obtain a mixture;
culturing the mixture under a predetermined condition; and
determining that the test bacterium is a bacterium of genus Xanthomonas when the test bacterium is lysed after the mixture is cultured under the predetermined condition.

11. The method according to claim 10, wherein the mixture is cultured on a solid culture medium and wherein the mixture further comprises a soft agar-containing liquid culture medium.

12. The method according to claim 10, wherein in the culture is cultured on a solid culture medium, and wherein the culture comprises a soft agar-containing liquid culture medium.

13. The method according to claim 10, wherein the test bacterium is isolated from the plant tissue affected by the plant disease before culturing the test bacterium.

14. The method according to claim 10, wherein the bacteriophage has a genomic DNA sequence comprising a base sequence shown in SEQ ID NO: 1.

15. The method according to claim 10, wherein the bacteriophage has a genomic DNA sequence comprising a base sequence shown in SEQ ID NO: 2.

16. The method according to claim 10, wherein the bacteriophage has a genomic DNA sequence comprising a base sequence shown in SEQ ID NO: 3.

17. The method according to claim 14, wherein the bacteriophage is bacteriolytic against a bacterium of genus Xanthomonas.

18. The method according to claim 15, wherein the bacteriophage is bacteriolytic against a bacterium of genus Xanthomonas.

19. The method according to claim 16, wherein the bacteriophage is bacteriolytic against a bacterium of genus Xanthomonas.

20. The method according to claim 10, wherein the bacteriophage is contained in a bacteriolytic agent.

The application's sequence listing, which the Patent Office published only in electronic form, follows.

SEQUENCE LISTING (11 sequences)

SEQ ID NO: 1 - DNA, 42933 bp, unidentified
  source 1..42933: mol_type = unassigned DNA
  misc_feature 1..42933: note = the genomic sequence of a bacteriophage
gcacggcatcgaccttccgcccggccttatgcttccgaaggccgcagcgtcggccattgcgaaggcatcgaaggcgcttaccgggttcggctattcgcagtcgtcggcgacgttctatttcgaagacggttcgtttatcaagtcgcagctttacggcgaacgttacccgaattacgcttcggttctggacgttccgaatctgaacctttggccgatccccgaagacttttaccggggcgttcgtgctatcgaatcattcagtccgaacggccatgtcttcttagaagatggcgcggtattgtcgcgtatgcacaaagaagaagcttcgacgtatcgtatcgaaggcttgccggaacgaatggggttcagtgcaaagcttttgctttccgtcgaacacgcattcaagaaagcgcatttcgacgccgaaacgaacaaagtaattttctacggcgacaacgtgcgcggcgcagttatggggcttgaccttggaaccgaagcgtcgtatactgaacagtcggaagatacgtacattaaccgaacttcggatgatccgtattcggacgatataccgttctaaggggctgtcatatgttgaacgaacaaggcttcatcgttgccaagaaaagccgcgtcgtcgataagttggccgcaagcattcgccatgctttgcggcctgtcgaattcatgtcggacgaagaactaatggcgcttcccgctggaagcgtcttcgtctttgacgttgaaacgtatatcaacttttggtatgtcgcgtttaagtcgcttgataccggaaagttcgtcgcgtttgaacgttcgcccgaccatgactttaacccgacgaagcttctttggatgctttggcgattctgtattgtgggcttcaacagcgcatcgtatgacttgcccatgatcgaacttgcggcccgtggtgcgtcgtgcgccaagcttaaagaagcttcggacttcatcattaaaagcggcccggcctacggtacgaagaaggttacgccgttcgacttcgaaaagaagtacggcgtacaaattggccgctacaaccatatcgacttgttcaacgtttgcccggtgaacggcggcgttactgcgcgcccggcatcgttgaagctgtacgccggtcggctacattgcgaacgtatgcaggacttgccatttcccgaaacgcacgtattgacgcgcgaagatgccgcaatcgttcgcccgtattgctgcaacgaccttgcgaataccgaacttctgtttaacgaacttgcgcccgaattgaagttgcgggccgaaatgtcggaagaatacggcgtagaacttcggtcgaaatccgatgcgcaggtagccgaagcggtaatcaataaagaacttgaaaaggtgttgggttactatccgaagaagcccacactaacagacgacggcccgttgtattacaacgtaccggacttcgtttgtttccagacgccgcagttacagcaaatgctagaagtcgtgcgcggcgcggcgttttatctggacggcttgggttcgcccatcatgccgaccgaaattgaaaagctgaaagtaactatcggcaaatcgacgtacaaacttggaatgggcggccttcattcgacagaaaagaaggccgcgcacgtcgcaaccgaagacattattctagcggacaacgacgtagaatcgttctatccgcgcacgatccttaatcaaaagctgttcccgccgcacttgggcgaagcgttcttgacggtttataacaagatcgtcgaaacgcgaattcacgctaaggcaatggcggcgaagtgcaagaaagaaggcgaccgcaagggcgcgaagaaatggaaggtaattgccgacagcttgaagattacgattaacggaagcttcggcaaacttggcaacaaatattcaacgctgtacgcgccgcaacttatgttgcaagtgacgattaccggacagcttgtattgcttatgcttatcgaagcaatcgaagcaatcggcgtcgaagtcatttccggcaatacggacggcttcatttcgaaatatcacaagtcgcggcatgaagaagtccgcaacttgattgcagcatgggaagcgcatacgggatacaagaccgaagaaacgcgatacaaggccgtatattcgcgcgacgtgaatagctatgtcgcaatcaaagaagacggcggcgacaacgaagcgcgcttcttggatgaaaaactaggcgcgaagacgaagggcgcttattgcgaacgcggttccgcgcttaattccatactgtcgaagaaccccgaagctttggtatgttcggacgcggttattcggttccttgtcgaaggaacgccggtagaaaaaacgattaaggaatgccgcgacttccggcgcttcgtatgcgtgaagaacgttcacggcggcggcgaaaagaacgggcgtttcttgggcaaggtcgttcgctggtattatccgaagaacgaagccgggcatatcgcttacgttgccagcggaaacaaagtcgggaaaacggacggcgcgcgtcctgtaatggacttgccgaccgaatttcccgacgatataaattacgactggtatattaacgaagcggtcgaaatgctgtacgactgcggacgtttgaagaaagccaagaacggcgaacttgcgttcttttaagatagcgtcatggtcaagcgttcgctgttcgtactgaacagcccgcttgccgtgatttgcgtatctacgataacttccaacgtaccgacaaggccggttacgttaagcgccgtcgaagtgccggaaaccatgaccgtagtatatccgccaccgccgacgcgccaccgcacgcgcgtttgcgtcccggtttctagcccggcgtctggatcgttgaagacggacagggcttgcgcttcgcggctgcggcgcgcccatgccgccgtgatcgacgttgcgcccgtggccggggcaggggtacggctaccgtcaagggtaaggttctgcggctggtacggcaggcgtgcgcggccattctgcgcggcggatacggtcggggcagacgacagcggcaacttgtccgaagtcgtcgtatccaacagcttaacgtacccggtcgcactgttgttcacaagctgcggaatcaagccgtcgataccgccaacgaaccaaacacggtcgcccgtcgcatggcttgccggtgcggtatccagaacgccgcgatacaggttcgggaaagtaacggaaccgtcgccattgtcaacgaagccgacataaacgaacagttcgttattgaccataagcaacgcggaaccgtcgcgggcttggtcaagtgtcgtatattgttgcaagttcgcaatatctgccgacgatacgccttgcactttgaatacgcccgtcgtgtcgtgtcgcgtatctgccgcaaccgtgttcgcatatgcagccgacagcgtgccgccgccgttgtacggggctgcttcaatggctagtgtgggatcggtagcgaagttgtcgccgctgaacatggcatcgaacgaaatagacgccgacgacggccccttagccaagatatacaaccgaccttgactgtcgaacgtcgaaagggcttcgttcggagtaaggcgcgccaagaagtgcggcggcgtaaagaagctacgcaccgtcacggcatttgcgtttgtgttaatcggcgtccagttcgaagaatcaggcggcgcaaacgtaggcgtcgccgtagcgaatcggtcttgaacgcaagaaatcttcacttcccccgacgtaagttcgccaaggtcgattttcgaaactcgcatgaccattttttgtaggttgaacggcccccaattcagaacgaacacgtcgcccggacgaagcgtcgaagccttgcgattgcaagtaatatcgcacttatacagcggaacgctaatcaacgaaagttgacgcgccgcaagcttgtttgcaacttcggcagtcgtacagcccggcgaagaaatttcggtagacttgacgcgctgttgatagttgatatttgcgaagtcttgggcaatggctacgctgtcgtcgtaatcgcctgcgcgatctttgaacgtaacgcgacattgattaaacgtactgtcccaagtcgttttcgaaaagttcttcaattccttaataatggattcgtcaagaaccggcaaagtgttaatgtcgtagtcttgacgaatcaacttcgcaacaatctttgaagttgccgggtcttgatacagcaagccgtcgcattgccgcataatttcttctaacaggtctttacccgtaatggccgattgcgcagccatagacatgcccatttgttcgttatacagcgtttgcgcgcacgcaacgaacgaaggcaagtccagaaccgaaggcaagttaccgaagcgcccgaacttttgcgtaatagcatcatacgcaatttccatcgggttcaaatcaagaccgttcggcataatcgaatatgtcgcgtgaagaccggaagtcatacgcgaaatttcgaagctgaacatttcaagattagtcgtcgtgccgatataaaacgacttgaatagggcacgcgcaaaaccattgtacgccggaacgttcggatcaagaaccgaagccaaatacgaatcgcgcggcggatcgtaacgaccgtcgtagaacgtaaacgtaccttgcaggccgccgcgttgatcttcgccgccaaacaagttcggttgattgattacaatattcgtaatgcccgaagcggtgccagtccaaacaaggtacgtaccggcccaaaacttacgaagtacgacgcccggcccaaggcacaaacagcagtcgataccgacgtagtttttataacccgtaataaccttcttcgaactgaacaagcccgaagaaactttcttcttaatcggaaccgggcggaaatcaccgaaccaaaacgtaatcggcgacttttggcgaacagttccccacactaagggcataggatcgccgtatttcgaccggggaacttggaagtcgccaagcttcgccgcccgcgcgttttcaacgttcggtttcggcataaacgcgaccataagcaacgcgattaccgcgataacgattgcgacccacatattagctaattccgttcgtaaatgggttattcgattcgcccggaacaaacgggcaaccgccgaagtttatttggttgttgaacttcggacaaccgttcgcgcttgtgaagctatgatcgcagcccgccgtaacttgaatcgacgtgccgacagaaatacgcgaaaatccatagttgaccgttagaattgcgccagtttgcgcaacgatcattcgacgttcgttgcgtgccggaattgcgatttcaccgccgacaaaccatccgttagggaaaccgccaatcgacgggatgctgatttgcaagccgtccgaacttatcgcagatacgacagtatccagcgaattagatacgcgacttactttgcaacgttcgtcgaacagaacgttattgcacggcggctgtacgtacacgttcgggatattgccttgcaaaatattgccgaacttgcttggcgtgcgcaacgttgcttcttcgccgttaatgataatcgaagcgaccggccctttccaatacggaacgaacgtcgcggcgtcgcgctggaaacgataaatcgtcaaatccagcgcgggcggcgtagtttgaaaaccgtagtcttttacgatttgttcggtaatcggaacgataatcgtaaggtcgatattgtcttcttcgtgcgtgccagccttcaacgtactacgcttcaaacccgaaacaggattgtacgtcgaactgttgaaaacgtgcggtatgctgtccgtagtcatgtaataactgcggtaagttccgacccattcgtaaagttcgtatggcgcgccgtcttgctggcttatttctttgtcgtcgtaatcggacatttaaggttccgccgtaatcaacgaaagttgaagcaaactttctaatccgtaatgcttccatgttaccttgtcttcggccattcgcataggcagcaggaacgaaattcgtttaatgtccgtccagcctgcgccaacaggcaatgcaggatcgaaaacgatgattgtagaaaggccggttcctgcgacggctgcgccggttacttgcgttcgatgaatgccggaagccgtttcaacttcaatataacgatgcgtgacaataggaaagactttttcggcatattcgacaccttcaattgtgaaagtcgaagcgccgtccgaaggttgaacaaccaatcgcatatcggttcggtatgtgggcacccaaactttacgcgccgcaccgcgcatatacgcaaatagcgttttccaatagtccatttcttcgggacgttgaatgcggttcactttgtacgaacgcgcgccgccaatacggctataatcccaacgcgaaataatgtccggcaatccggtttgattgtcgattgactgttggccggtagatacgttgtcgtctaccatttcatcggcaagcggtcgcttttcgaagaccggaacgccaagatacgtcggaagcgtgacggttgatccggggcgcacaagctgcgcacgctggcgaagcatcttgcaaaccaacgtcgtttcggcaacttcgttaacagcatagcgcgacagtcccgaaccgtcgttcagcaacgcgggcgaacccggcatgattaacgatcctgcgggaatatcaaatagcaattgcgaagttacagtagcgccagttacagtcaatacgtctatttcgacaagtgcattagtcaacggcgtttgaatcaaaacgtattcacctgcgcgaatgtcggtcttcgacgtgtcgaagtaaaggttaaagccgcccgttacgctggccgaaagcgtgcgcgttgcgtactgaaattcaggaatccaaagccgaccgactgcggccataagatcgctataaaactttcgaatcttcgtcgaatcgtcgaaaataactttcaaattttcttcgacgcgcggcatttcgccgcgcagcgcgatgcgctgttcggtgccgtcaacagctacgatattatcggtaagccattgccattcttccgttaccggcgtttcggggataatgtcgaacttaacggcgcgcgtgccggtcacaagtaccggaagcggattcgttacgttggcaaagtcgaacaaaatttgaagatcaatgttcgccgggccggaagttcctacttcaatttcgtaagtctgttcaaacaatggcgggaaggtaaacggattcggcccgattatttcaacgcctatcggattattaaccaaaatatcttgcatgatcgcggaagtaaacggatatgcgttccatacgtcaacttcgcgcgtttgcgtacttgcaatcgtttgcaaatcaatttcttgcggcgatacgtgaattcgaaaatagtaatctttgaaaaagttttcgaattcttcgcccacaataggccagcggttcgccgcatgaacgcgccaaaccgcataagggccgaaaatacgacgcccgattacgtcgatgccgacaggcaaatattcaacttccgaatatttgtcaagttcggtagaataatcggggttatcttcaccgtaaataaaagattgcgtaaatacgccaattcgtccggccattgtttagcttccggtgtatttgatagcgtatccgtaagttccactatgaatagaacttgacgatccttgccgttgcgtaaggtctttccgataaaacggataaaccttccattgatccgggccgtatgtgaccaaacttccgggttccaagttgtcgattcggcaatagcgaacgctcggcggattgactacgatagtaaggccgccgcttccgcgtgtttttattccttttaccggaacaagtacggttgccgaatttgattgatttggcaatgcgttaatgattgcggcgcaatgcagatagccaagattagaaccgcgcgtgttgtaccaatttacggcgtcgagtccgcaatgaaaataattgccggtgtaactaccaccgcttgacgattcgaagaaaagtccgccagccagtccccaaaaaccacgggttccgccagaatccatgttactgccggaattcatgtcgaattggtttccacttccgctttgcgctacacggctgtcataacttccggtaaaccatgcgccgataccgccaatgccggaaatcaacgactttccgaacgacaattgttggtaaaaatcggcattgtaattgataacgcaataaacttcgtcttctggcgaagtcattacgtgaatttcgtaatttattggaaaaacgataggcgttccagttggcgacatgacttttacgaaggcagacgggccgccgttcaaggttgaaccagtttggccggttccgccttgcaacgtaagttgcggcgtagtagcgacaaattggaaaaaacaaccgttcttcgaaagaatgccgttagaaagcgtccagccgttagcgacgcaagcgttttcgatagcggttttcaaatccgcgaaagtcgcggcacttccgttatagtaggccattatttcatttccaaagcgacaaaatcgcgccaagttgtacggttaacgttctggcacattacgaaagcgcgcccgccaactgctataattgcgtctacagcttgaagtaccgtcattcctgtttgatctacgacagaacttccgcccatttgaacgacattttccggcccattgttgaagccagaacaaaaataaacgccgtccaattccccccaaacgttgccgcttcccgctgtactttgaatttgcgaaataattataggttcaagttggtaataaacgtcggcaggaacaagcgtattcgatccttgcggcccagcaagtgcgccggtactaatgttcgcattcgtaaaaggatacgaccaaactttagtccatacgccagtttgataacgcagccacatatagcattgcgacgaataatattcgcccggatacgggaaaacttggttcgtatccgaaaaacgtttcgcttctgcgccattaaacattccggcgcaaatcaaaggcgacgggaattcacccggacgcgcatacggaaacattttccctaaatagaaatgttcgtaaaccggcgtacctactttaaggcatccggttatgcgttgcggattcgcagtaatgaaataagtaattgcgttattgtgggcaggtacgcccgaaatttgaattcccggctgcgtttcgaaactatttccagctacatagccaatcatagttgcggcttgaaaattgtaataatcaccgctaacgttgttgtaagttttgaaaccgataaaaatttcttcaagaccggaaagaccgacgccttttccgatccattcccgatttgttccggtgttgacataacgaagggtagtccatccgttagcttcggccaaagttttgataatagccaaaagctgataataagcgtcgtcgccgctacctttagtcacggtgcctattgcgtatcccattatttaacccctacgattcgggcgacggtgccgccgttttcttcgatagtttcgataacaaatgctttgccttcgctggacttcatcgcagccaaggcggcttctttcgattgtaccacgacggcagttaccggcgtagttacatttacttcgggcgcagcagccggggccgcttggccggtgcccacattatccccgttgcgctggacgctggccgcgccgctttgcagggcttgcaggttatcaacgccaatgcggttcgtcgaagctgcgttcattacgaattcttgaccatgcacggcacccgctacggcattcgtcggaatgtcgccggtataaccgcccgacatgaacccggtgttctgcgaccggatttgttggacgttcgccaagcctgcggcaatcgcagccgcagccgcagccgcacccaacgccgggccgacgtaaggaatcgacgcaagcgacgaatacgcgccggtcgcagcctgatacgtgttaatcatggcttgcgcgatagctgcggccttgccaacggcggccattttgctattttcggacttctgcaattgcgccatttgtccgaagaaacccgacgcggcgttaagcgtttggttctgttgatccagccaaatacgttggcgcagcgtcgcggcggtttgttcgctaatcaaatcctgttgccgcaattggtcgatacgcgaatacatatcttcgtatttctgcgcttgaccttcgaaatacgtatcggtattcgtgaagtcaagatcgctattcgcgttcattacggcgttagctgcgtcgccttgcgtgaagccgctttgcggattgtttttaagcgcgttaatcgccttcaattggtcgatatactgttggcgcttcgtaacgcttgcgtccattagtgcggcttcttgctgcgcaagcgcgttcgcctgctgcaacagcgtaagccgttcgcgcagttgcgtaagttcttcggcattaagcgtaatgcccttcgtcaacaggtcgttttgcacttgcataacctgctgttcgatttcgcgttgcttcggcaacaactgcaaaagctgcaactgttggtcaaggtcgcggttatacgcgcgcatcgggtcttgcgcgttcttgaattcttcggtcgccttcgttactgcgcgcgaatactgttcttgcgaaatcgcgccaaggtcaagaagctttttcgaagcttcaagcgtggcggtgtaatcgcgttgcgggccgacagcttcgttataaatcgcgtcgaacttctgttgcacgatttgcgcttgctggacggcctgaatcttcgccatgatcgaagcgcgttcgtcttcggtaagcttgattttacgttgaatcaacgattcttcgatttgatccattttcgcttgcgcttcgcgttgcggttgaagcgtaaacatgcggttcaattcgttatcaagctgcgtattgatcttttccaacgccaagccgcgacgttctgcggccttcgccgccttgtcgtcggtagctgcgctaagttggttcgcacctgcgccgcgaagcgaagcgttttcgcttgcgcgacgattcgcgccgatttgttgcgcgcgcgtcataagaccttcgacgaccttttgcattgcgccgccttgggacttgaagccgtcttctagcgattcggcccaaagcttgccccaagattcgaattcagtttgtccggcttggcccatgcgttcgaagttgacaagttcgtatgccgacttgccgaccatcgcgcgaagcttattcgccgattcaatcgccagattcgtaacccgttcaatccatccgacgatatagttatagccgtttgcgattccgttttgaacggtaatcacaacttcggccatagcacgacctgcgaacgttgcaaggccggtaatgaatccggcgattgcgtcaagaactttcgcggtgttttccagcgcggcggcccatccggtgcgttcggtctggaagaacgacgtatagtcttccgtccagccggaaacggcatcgccaacgaacgacgaaatttcgccaagcgccccggacgcgccttcggtcatgtctgcccacaattggccgacaatcaaggtcacgtcgctaataacttgcccgatgccttcgaaggtcgcgcggaagaaatcgcccaacgtcgtaacgtcgtcaattcccaagttaatttcgtcgcggaacagcgtaaggtacgcaatgacggttgccagtgcgacggcgataaggccaatcgggttcgatgcaagcgcgacggtaaacgcctttacggcagtcgttgcggaaacgatagccgcgacaatctgcggcccgaatgcaagaagcatcgccgttccaagcgccgtaactacgacggcaacggtcttcatgttgtcggcaagccaaagaatcgccttcgacagcgcagccgtaacgccggtcgccttgttcaattcgccgaagaattcgattgcgctgttcttcaagacggtaaggctttggccaattgtgggcgtcgtttttgcgaacgtgtcatcgaccgacttctgtataagctggaatgcgttaaacagaacttcggacgtgattttgccttcggtcgaaagttgcttaacgcggttgataggcacgttaagcgccttcgctactgcgtcaagaaccatcggcatattttcggatacggcgcggaattcgtcgccttgcagcttaccggcgttgaagccctgcgaaagctgcaacaaagccgacgacgcttcttgcgcagttgcgccggaaacgataagggctttgttaatggtttcggtcaaccgcaacgaatcttcttgcgatttgcccatgaacttcaacgcacgatcaaagcgcgtaaacgctgtcgcggtttcttcgacgcccgcgcgcgtgcggttcgccaagtcgaacaattctttcgtaagcgttacgacttgcgattgcgattcggtgacgttctgcaacttgttttgcagcgtcgtatatgcgtccgccgatgcgagaatagcgccagccgacagcgttacgcctgcgatgcctgcggcggctttgacgtatccggcgatttgctggcctgcggtctgcgacgcctgcccggcccgctgctgcgcttgggccagccgcagggctgcaagggccgcccggtcgttggccgccgccgcgttggccgtctggacggctgtacgctgctgttcggtggcaagacgctgcgcagcgttcgccccctgcgtttgggccgtgctggcgcgcgtggtggccgctgcaaggttctgcgcggcggtctggccctgtacctgcgccgtagccgcgcgcgtctgcgctgcggcggcgttggccgttgctgcggttgtctgttgctgcgccgtggcaagccgctgcgatgcggtcgcgctgttggtttgcgctgcggccaagttcgcttgtgcggcctgcgcctgcgctgctgcggcggcggtctgctgctgcgctgtcgccaaacgttgcgcttcggtggcggccttcgactgcgcggcggaaagttggttaatcgcggcgttcgccttggcttcggctgcgatggcacgttgcaacgccgcttcaacgttagccattgcgacttgcgttttctgcgtttcggtggcaagcttctgctgtagaatggcggtacgtgcaagttcgctttgaaggcgcgaaagaccggacgaagccgaaatcgacttcaacgacgattgcaacgcctttacggcgctgtcggcggtgcgagcatccgaagcgatgcctttaagcttggtcgaaatggacgaatcgactttatcctgtactttaatttcgatgttttcggccatttcgtcttaatccttaatcttgaacttcgcaagcatcttgcggccaatcaataccgcacgttcgacgaatcccgcaggcgcttgcgctgaatatccgtcgttaagccgcttgatatacggaaggttgttcgtaatgaaaatcgcttgaccgggcttcttgtttgcaagtacgctttttgccgcgttgatcgtttcggctgcgcttgcccgttgcgacgaaccttgaaggccgaggtaatgcggtgcaatcgtcccggttgctggcgaatcaagcgtaacgcgccagttcgacaaagcttgcgaagtatctacgggcgtcttatacgccaagtcgcccacaatagccattgcggtatcgacggctgttttagaagccgcttcgtcgattgccttagccttgcgttccagactaacggccagacttagaaggtcgtttgccattgcctttattcgccttatgcttcgcttcaagtttcttcaaatgttccgaatccagtttacgaacgaaataaaacaagtcttcccgctgttcttcgtcgaattcgaatgccgacgcatacgccgcaatacttgtccaaggaatcggcgtcaatcccattgcgtgcgttcgttcgctatccaaatcgaagaaggcttgcaaatacaactgcaagcccggttcaagttctggcgcgttggcgatgcggtcgggtaacggctggcccgcccgcatcgcctgttttgctatggtctgttcgtgcgggcctagttcgaacagatacgctagaacttcaatcagtttcccgattcagtttccaacaccgaatcgcggaagttggccgacaacttggcttcttcttgcagacgttcgtaaacgtcgggcagttcggacagaagcgaaattgccgcgtccttcgaataggcgatggcttcgcccttttcgtcctgaacgttcttccagccgcgcaggatggtatcgacgaaaacgcccatgaaaagctgttcggcgacttcgtttttcatggtgcccaattcgacctgtcggcgatacgggcgggtcgcggcttccagcgacttggaatacgctttgttcgacttgcccatgcgcgaaatgatgaacgtgggaacggtgccgtcgtcgttctgcgcttcgggaaattcgatttcgacgccttcggtttccttcgccgaattcgttttgaattgcttaaacagtccagacatttgatttactccgatggatgaaagaagggccggaaaagtccggcccttcaagtgtacccgacttaatcgggcatggctaccgttggcaggtacgaaaacacttcgtacagcatcgtataaccgttcgcgttttccgcgcctgcgggttcaagcggaacggtaataggcgcgtccttttcgacgttcagccgaccgccgcccaaaccaagcaacggaatgtcgaagatgaaaccggcgttcttcgccgcgctgataaccgacaaaccaacgtcggcattcgcacgaaccgccttcaccgctgcgacggtcgtaaagtaagcggtaatcgaaccgccgacttcgaagttacccgccgtcgtgtcgaacgcgcccaagatgccgacggccttgttcggcgaaacgttgttgttaatcgaaacgttcgcttcggacacgtaaccgaacagggcggcgggattcgacgaagcgtcgtcgtgaaccgccatcttgatacggtaaatatccgacgaagtgttatacgcatcttcgcccggtgccgcaacgcgcgtaccggccttctgttcgtcgccggggtcgccgctgcggtgcgtgttgtcgcacgcgatgaacgtaagatcggcgttcaacttgtcggcctgcggaatgttcaacgtaaattcgttggctaccgcgccttccaagtattcgcattgaacgccgttttcgccgttgcccaacgtgcgttcgatgttgtacgaacgacgcttgataagggccgggtctttttcgttcttgataacgacgccgacgaacagacgaatcgacttgccggttccggtttcagttgcagccgcgaaggtcgtatcgtcgaaaacaagcgccttcgccgaaaccgacttaatgcgagcgtagcccacattatttgcaaagcggttcgacgccgcgtcgccgccgatgaacacccaacgaccggggaacagttcgggcatggtcgtaaagtcgccagcggtgacgaccaacgaagcgacgccggaagtaacggcgatgttcgcatcggctgcggccagttgacgcccgacgacttccagtttcacgccagcaggcggcgcggcttcgtcgataagcgtttcgttgacaacgacagtcgttgcggtggacgaagcgacggttttaaggccgttgttcgcagcgtttgcgaagccggttgcgttgacaagcatgtttgcagcgaacgccgcgccaccgcttgcaacggtataggtcttcgtcgaagcggcgacgcccgaaattgcgatagctgcggcgttcatcggcgcagtagacggcagttcgcgcgcgtctgcgaagaagaacccttgcagaatgcgggtaaggttcgacttcgtaaagtccgaattgaagccgcccgatgcgtcaagatcggtaatcgtgcccttcttgttctggcgcgacgggtcgataggcgcacgggcaacggtggacagttcgccgccgaagtccgaatagctgttcggttccagtccgtaccaagtgacggacgccggaagttgcttcaagcattcttcttcggcatacgccagtccggtaatgttcgagtcgattttgttgatagcgcaatcggccattttcgtaactccttcaacctaattcgtcgtattcaaattcggtaacgacgttaaaccgttcgtacagttcttcggggtcaagttcgtttatgcgaacatttcgaaaccaaatctttcccggcgtagtctttccgcgaaaagcattgcgggcaatcttcgccagcgtttgaccaagtgcgaaagcttgcgtattcgatttcgggcaaaacacttgcacgaaaacaagccccgacgccgtataacgtttttgtcccggttttccttcgcaagttgaaagcgttgtttgttcttcgaaaacggtttgtttcgacacgcgaacccaaaacttcgaaccgtccggcaaatcgcggtactgtacgccctgccaacgaatttcgggaacatagccgacgaccgcgcccgcgttagcgttccacgccgtaagaaacagcgtattgatttcgtcgcgggcttggtcaaattcaatcatgcttgaaaaactaccgtgtaaagtaccttttgcccattcggcgaaagaacgtcgatatttgcgattcgaagttctacgccatcccgaataactacgtctttcaagttcggattaaacggcacgtttcccataagccccattaccgaacctttcggaacttcggtgcctttgataaacgtaaatgtttccatcgtttgccgatcaaccggcaagaagcaaatagttacgtccttgtcttcgggcgttgccgggccggggttccacggctgcgacggatcgggcgcggctgcgtcgtcaataacgcgccatttcaccttttcgccgttctttgcgatcaatcgcaacgccgtttgaatcgcgcggtcaaagcgtgccatacgtcaaacccgaattgtccgaagtgcaaacttgttcgaagcgcattcgccaaacagcggcgcaagaagcgcgttcgctgcggtaaacgtgggcatgatgccaacggctaccgggtcggcgtattccgtttcgattgggccgaccttttcgcgcgttacgtagtcctgcggcgaaatgttcggttgcaggtcgaagcctgcgttaatcgccatcgccaattgaacttgtgcggcgataagcgatttcggaataacgttcgacgggacttcatcgcagttcaggaatacgccggtacgcggccacgcaagcgcctgcgtcggcgacgtgcgtttgccttgataccggcattcctgcgcttctaggtagtccgtcgcacgaatcaacatcgcggctacttcgtcgtcatccaacggaagttcggtgccccgattggtcgcgtacacgcgcgcatccgcgacgcttacgtaactgttcgcgttggctacgccgcttccgtcttcgactacgatagtaattgccatgatgccgaatccttacggtgtcggggtgaaaacgccgcccgtgatttcgctatcgacgacggtaaacgttacagttccgccagtgacagcgacaggggttccggcctgtacgattgcttcggtagcggccagaccgcgcgccgggattgcgtcggggtcgataacgtctttcgcgttgtaaatggtcggaacggtgcccgcgaccaaatcgcacggaataagacggttcgtttcgccatacttcgcattctctgcgccgttgactacggttacttcgtaggcggcttcggcggctgcgttcagcttggcaatatcggcaagttcgcccgaagtcggggtagtgcctgcggtaaaatagacaatgcgttgcatgttcgtttgtcctttcgttgcgcctataaaaacggcctgcccacactaggcgaacaggccgcgccctacgctgcgcccggccttactgcgccgggttcgggttccacgacggcgcgccgccgccttgctggcccgctgcgggctgctggccgccagttgcgggggccggggtctgcggctgctgcggcgcttgctggccggtcttgccgcccttggccttcggtgccgggctgtcgccgaccttcgaagtaagttctttcagttcggcggccttcttcttgatagcttcggcggcgtcggggaacttttcggcgtagatcggcggaactgcgcccgccacgccgtcgcagatttccagcgaatgcgcttcggacggtacggcgcgtgcgttgcggaacgaaacgcttgcgttcagttcggcggctgcggcgaaatcttcgggggtcggggccgggccatcgacgaagtacagaatttttgcaggcttcattgcattatctccgatgttcattcgtattactccgaatgattgaaaggattaaacgaacggggccgaagccccgcccgttcgttcgttggttagtgaacttcgacgatcacgcccgccaaatccttttcggacgtggcgtaacgatcccaattcgtcgaagtgaacagggccgcgtcggtcggcgacttgccgccgttgcccttgtcccatgcgaagccacgaacaccgacgttgtacgaccattcggcttggtaaacccgaatcaggttttcgtcgccggtcttgccttcttccatcgcgtcgaagtcgttgttctggccgatcatcaccgcacccggcacaaggccaagaatgtgatagacgttcggcgtacccgccgcaaacaggttcggactgtcggtcatcaccagcagcttgccgaacggatcacgaatcacgttgacggtgccgtaggtgaacaggcgttcggagttgttcaggttgttgccgtacagcttgtgcatgggcgtgctgtgcatgatccatgccgcaatctgcgacgactggtcgccgaacttcgcttggccgttgttgaggttgttccaagtcgggccgtcgtccggcgcggtgttgccggtggcgtcgtacttgaccgccgtaacctgcgtaagcgcggcgtaagtcgcgccaaggccggtattcagcatgtcggccatcgtatcgacggcaagctgttggcccatcgcagcgcccgcgacttccgggttctgctgaatccaacggaattggccggggtcaaggcgaatcggcggcgtacctgccgcaaccttcaccgaagtatcgacaaggtgtttcatcaccttttcggcgacagcgccggtgccgtaggcgttacgacgacggacaaggccgcccgcaaccttggcgaaaaacgccacgtcgctaaagtcgccttggtgcgccgcaccttgaaggatgatcgcgccgcccgttgcagcgttgaacaggtcgatttgctgccgcaggacttcggagaacgaagaataggcgtattcggagtaaaccgcgaggtcggaaagtgccatgataaagcgtccttattcagtagtagccttcgcttctttcagatgcgccgcaagttcttgcggattcatcttcgaaaggtcggcgggtttgtcggattgaccgggattcttcggggcaccgccgccgttttgcgaaggcttaccggcaccgccggacgccttactgccggtgatgatagcagaaaaatccttgtttgcaacaaattccgccgacagttcgtcgatggtcattgccgaaggcttgccgtccttgtcaagaatacgggtcttcggttcgtcgccttcgaagtccgcttgcagacgcgcccgaatgtggggaaggataatcgcgggtgcgttgctgattttggttgcgatggaaagcgcgacgttatcgacaagcgatttcgtcgtatgggtcgtaagctttccgatcttgccttcgtattcgttcttttgatcgtcaagcttcttttgccacgacttttcaagcgtagcaatgtcgccctttttgcgggcgtcgtcgccttccagttcggccaaacggtcttcggcttctttggcccgcttttcagcatcgcggcgcaactgcgcttcgcggtctttcgcgcggcgaagcgggccggtgtcttcgtcgccgtcaacgtccagacggaaacagtcgccgtcttcgacgtattcgaatttcagcgcgtcggtaagcttcgaatgttcttctttggtaatacgctttttcagtgccatttcgtaggactcctacaggttatgccgatacaccgtatcagcgggaaagaatctgtttaatcttgcgtcggaattcgtcaagcgttagcggttcgtcggcttcgtactttggaatatcggaagctttcaatttgccatcgcgtaaagcttcgccgccttcggtgcctaatatatcgtcttgcacttccagcggttgacgcgcaagccaagtataaaacgtttcgtcgattaggtcactagccgtattcgccggggcagtatgcgaccggcaacgaatgtgcgcaggcggcaacggcccggccccaaaccgataacgcttgcgattgcggcttcggcaaacttcggtcgtgttgccatccataaccgaaaaccaaacgtaccaactaaaaaccgcagacgctacgccagccgctacaattgccgcagtatgtgcgaaggcggtatgaataaccgacgcggcttggttattgattcgcgcaagctgcgacggcgtgccttggcgtgcgccttcttcgccgatgatttcgcgcaaggtttcgtcaacagtccagcgattcgcccatgccttgcgaatgatgctttcgattgacgcttgcgccgacgttgtaaacgtcttgataaacggcagaagataaagcccgttcgccggaagcggcgaattcgtaacttgcgaccaaatacgttcgtcgccgccagtaatggccgcaataccgaacaacggatttgcgccgctgtcgttggcttcgattaagaactgtattgcgtcttcgtccgaaatgatttcgtccgacgaagcgccgtcaagttcgatatagcccgtaacccatgcgcggcggtttacttccaagtccgcagccatgaacgctttaagctgttcgataagctgcgacgtgtacgcgctgtaaatcttagattgcgattcgcgcagttctgcgacaagcttatttagttgcgccttcgaaagaccgtcaagggtcttataacgaacacgaccaagaagctttttcataacttcgctaatgtcacgcaatacgaagttgaattggcgggactgctgaactttgacgccttcgacatatacggcaagccgcgttgaaatgtcgtataggcgcttgttatccgatagcgccatgattacgcacccccgttgcccacattatcagccgggggcgtgttgccgtcgcccggtacgttgtccggcatggcaagggccatcgcttcggcggtatccttggcaatgtcggccttcgccttcgcgtcgtcttcggttgcaatgccagccttccgaagccctgtacgcatttcggtaaaggtaatcgcgcccttctgccattcttcgataatctggcggcgttcgtccggcgtcatgcgggcaatgtcgaaatctgtattcagttcgaacttaacgccagcgtcgcccgcgccgatccagcgcgccgcccatttcaacgcccattcgaacgcggcgctaacgttcttcgttgcgctggacagcgtagaaccttccgacgccgcttccaattcggcttcggttgcggtgcgttgtacttctttctgttcgacaagctttgcgccaagtgcgaccatttggcgttctttcgtatccattgcttctttaagcatggtgttaggttcggcctgcaatagctttgcgtcggccccggtcggaagcggaatgccgccgcgcgaaccgaagttgaccgttcctttcaaaacgttgttaacccattcttccgttaggccggtaagtacgggcgtcggctggcctacgacgtagcacgattcttcgtaatccgcgctgttgcgatagtgcgccaagttcaacgacgcaaggtcgtagaagttcgggttatccgggttaacgtcgttgttttcggaacccataaacataaacgggatttcgtcaagacgattcccgttcgcatcggtcggcttgaatacttcgtgaagttggtaattgccgcgcggaatcttcgtgccgtccgctttggtcgggttcggttcgcgccaaatttcatggacgtaataaccttcttcgtccagacgcaaaacgcggaattgaccgctgttcttcatttcgaagccgtcatcttgaacgcaccacgtttcgaagataacgaccaacgacaaaacttcttccgcgccgcgatcaattgtccgccaattgataatttcggtcggcgcatagacgtacagcgtcgggcgaatcttgcccgcttccagttcggcaaccgaagcgccgccctgtccttcggtcgtcggataatcgaccaagattccggcgcgcgaatacgccaagttcaacgatacggccttcttcgaaagctgcgtaaggttaatgcccgatccggtcgcgtttgcgacaagcgggttcagcagggcgggaacctttacgaccggatcgcgcataaacacttgtccgataagaccgaacaaggttcgacgggctacgttgtaaaacacggcccgcgcgatatacgcatcataacgcgccttgttttccttcgattggtcggaagcgttcggcatcggaagatatttcgtccgcgcttctttaaccgttggttcccctgcgattgcgtcccgaataaggtagtacatgggaagcaacttcgacagttcaggacgcacaaaagatacgttcggcatgatttcgattcctttaagttggcattgatactttgactttcgtagccgctttgttcgcgcctttcaacatgcgataacgtgtcatgtcgtaaacgtgatcttcggcgcttgtgtctacgtcgtcgattttcttttcgtcgcggggcaatgtgggcaaaatatcaatgcttgcaacgcaattcgacatgaagtatacccccggcccttcgcgtttaacagacgcttctagccggtcgcggaaaagctgtaggccgataacacgcgaacccgacgacttgtccgattccatccagcgaacgcccttcttcgacataagcttttcggtcgtgtctagttcaacgtcgataacttgtcgaatgcgattatccgcagggccgggccacggctgcgacgaaatccagccgttcgccatcatcgaaacttcgcggtcgataatgccttgcgctacgtccgacgccgatattttaagaccgacgttcggcaagaattcgcccttttcgtccttcttgcatccgtaccattcgaatatctgaatcaacgaacccggttgcggacagaacacaaattcggttccatcggaaagaacgatagtcgcttcggtgccgtccgcttccgcccaccagcccacactaaacgggtgcgaactgccgtcgtcgtatgtgcggtcgatgcgccagcttggcggcacgacaaagcgcggtacgacgtgtatatgcgattgccaaaggtcgtcgattgcgccgcctgcggtaacgtcccaatcgccatacaaccaagctttgcgaaggttcggttctttaatgctttccagttcggcaatatacgacgccggaagatacgggttttccttgtatgaaccgaagatcgcaatttgcgtaattacgtgcgtttcttcttgttcggtcttcgggttataaatctggatactgcgacgaacgacagtgccgcgcggcgcaatcgtaataaaccgcttcttcacccaattatgaccggggccgcttgggttcgtcgtgctgaatacttcgcacttgatttcgggcaacggtagaccgttaggcgtcaaataacgcccggtcttcgggtctttcggcgtgtcggttatcgggtcgaacgtacagcgattgaccgacataaacttgtcgtacaggtcgccgctaggatgcttcgttaattcgttccatccgatatacgggtattcgtgaccgtggaagccttcgtaatcggcgaccttctttacgtgacgaaacaacagttcttcaccagtcggccaaacccatttgtattgggacggcgattcaaggaacttcgccccgtccttcaatttgccattatcgccgaaccattttttagattcggcgacaagtccggccaaatggtcgaactccaaatcgaagataattcctttccagaatttgccgtaacctttgccgacattacggtaatagcgcattaactgcgttagcgttttgccggggccgcgcgcgccttcgtacagggtatgcgcagcgtgcgaacaaagcgcaatcgtctgcgaaccgggaagcggcttaaatacgacttcgattggcggcgctttctgtagaatcagcggcggcgcttcgggcgctttaatggcgagtgcgggcattttctaacaattcccgctgttgacgtgcggcggcgttttcccattcgctttcactttggaaaacgggaacttcgacgacacgctgtacgttcgtcgttacgttcacattcgtttgcggcttttcgatgaacccgcgaacgtccgcgtaaagcttcgcaagcttcgcgtattcttcgggggtcggcggaatggtcacgccgtttgcaagggtcgtgccctgcatacgttgccaaatgtcgcgggcaagttctgccttcgacggaaggaacgacgaaccgtcgtcttcgcccattagccgttcttgttcggcctttacttcggcgtcaatcggccaatgattcgccacccatagggcgcggttcgtgttgtcggggaacagttgaagcgcagccttgaaggggtcgcgttccttcaaaagcaaggccgcatatgcggccttttcttcggattcgttacgttggtcggtcatggcgtcggcctgtcattcgcatttgccttcactataccgcaaggccgacgttctgttaaggcgaatcgaccttgggcggtttctgcggcccgcagttctttacgacggcttgattatggttcaggatttggcgcgccgtgccgggcgtcatgtcgtccgacttcgaaacccaaatcgcccgcacccaatcgcaagccgtgtcgattactacgggcttcgtttgtacggtttcggcgatggattgcggcggcttagtcgcgcgaccattcgtcgcgcagccgcttagaaacgccgtcatcgtcaagaacagcattatcggaagcaacttcgttcgcattttgcaccgcctttgttttacgttcggaagcttcgcgcgcttcgttaacttcgcgtactgcgatagcttcgcggtcggctgcgcgctgttccgccgcttcggcttgtccttcggacttaccgacttttcgggacgtaagccaaactgttgccagcatcgccagaaacgacaatgcggccagaatccagccgccgaaacgctttgcgcccgctgcgatgatagcccacattatccggcccctttcatgcaaagttcgcggcgcgctgcggcccgcgtgataaggccgggaagggtcttgtaaccgcccttgccgtccttgacgtacacccattgcggacggcctgcggcgttttcgttgaagcgtgcgcagcctgtacgatagtcgccgcgcttaaacgctgcgtcgattgacgttccgcagaacgtgccgaaatggtagttatgatcgactgcggcggccagtgcgaaggggtagccttgcgttcgcaggttcggcgcgcacttcaaaacgggttcggcgtgtttaatcaaaccctgttccagcgattcgcggcattcttcgatactgtatcgcttgccgacttcgacgccgtatgtatcgcccgcacacttcgtcggaacgccgataggatcaaggtagccgcgaagaaccatgccttcgaagcgttcggtaaagccggtttgcccggccacgcctagcaggattgcggcggcacctgcgccaagtacgcccgcaagcgtctttttattcggctgtttattctgcgggctttcgttcgattcgttcatttttcggcctttgcttgacgatccgcgacagtgcggacatggtgaatacgaaaagcgcgatgccggatacgaaccgttcggggatcaacgcgcgcacttcggacggcatggccgaccaaaggtacaacgcggattcaggccatacggtgaacacgcccattacggcggcaccgatagccgacagtcgaaccgaccaaagcttatgggcggtacgccaatcttcgattagttcgactttctttttcattacttcggcatccagcgttgatttttcttcaagtcttcaacgtcgcggcgaaggtcgcgggtttcgttctgaacgccggtaatttgtgcgtcctgtacgtcgttcttcccggcctgctgtatcagcgattgcgccaacgttgacagtcgttcgtcgcgcgtgtcggtcttcgcttccagcttcgtaagcgattgacctacgctgtccagtttgacgaatacgccacccattgaaaagactacggcacaagccgaaccaatcaaccaaggcagcggcaattttgcgtctatgatcttctgcggacgttcgttcatatcctgccccgcttcgttattcgacactacgtagccccttaatacgcgcaaggggcgaactgcgccccgaatgttcccgatagtacccgaaaaaatggccgtaggccagcagaaaggcaaaaagaagccccggacagtgccggggcttcgtgttggccgtagtgcggcccgtaggccgcacgccggggcgcttaggcggtacgccagacgcgcgcgccgccttcgacgctgcgaacaacgaacttgcgggtttcgcgggtgacgggcacctgttcgcccttcttgttcgtcttgaactggccttcgacgacttcggcgtaacgcgcggtcgcgctggaaacggtggaagccagcgacttggcggcgttcggcttgtcttcggtgttcgggacgaagaacgattggccgacgttcagggcgtcgaaggggtacacgttgccgccacgaccgcgaccggaagcggtcggcatggcgatgccgtcttcgatggcgaaggacgacggggcagcagcggcgacggtggccggggcggtgttggttgcggtgttcatggattcgatacctttctgagttgcacgggtgagagtttcgccggattcgttcgggccagcggggttcagttcgaccaagccctgttcgacaagcgggccgtgaacttcgggggtagtatacagcccgtttgcaccggctgcaacgatttcagcaagaccgatcacgacagcggcggaagcggcggcggtagcggtggacttcttggacttagccattttttaaactccttcgaaagaaagttaacgtcgcgttattgcgacaggggtaattttacgctgttcgttcgacgtgtcaagcgatcaacgcaaaatattttcaagttctgcgatacgttcggggctgcattcagttttgccccattccttgaagtccggccatacgccgttcttcacgttctcacaatatgaaagctgttcgcgcacttcgtcgcggtagtccatcgaaccaacgacgccgaaagcggcaacaatggcggcaatcgccaacaggactttaacattacgcttcattgtgggcaccttagttcgttgtttcgatgtttgacagtctacgactacttcgacggcttgtcaagcgaattcgcaacttcttcgatgcctttttgtgcgacaagctgcgccattaacatgccgttttgcatttcgacgaacgaccgttgcagcttatcaagttccggcgtctgcggcaagccttcggcgatttcgataagaccttgaatcgcttggtactgctgcgacagcgtttgatacaacgtcggcgcggcaagaaacaagttcttcaactgcggatcaacggtaatgcgcggcccgaatgcgacgaaatggccggacaagtccagcggtgcggccttggctgcgccgattacgttatgcgttacggggtcttcgaagaacaacagtccttcgatttgcgaatggtcaagcgtcatattcgttaatccatgctgaacagacattcgacgcccgcagcgatgaagatttcttcggcttcatcggcagacgcgcgccagtccggggaaatgtgcccacaataggcgacaacgcgccgaatgcctgcgtcaacgatgcgacgggcgcagacggcgcacgggaacagcggcgacacgtacagcgtgtaaccggccaaggcttcgccgtcgtgcgcctgcgcaatggcgttcgcttcggcgtgaattacgacggcgtgttgttcttcgcgcgtcatgcgcaagaaggcttcatcatcgaagccgcgcggcgggccgttgtagccaagcgacgcgatagacctatcaggccggacgatggccgcgcctatgcgcttgcgcggccccttcgaccatgacgcgacttgttccgccagttcaataaaccggcgatcccatttcgacagttcgtccgggtgcgtgtaaatgacgtgaccgcgcttcattcctgcaaccgccattcacgttcgcccgccagctttgcgccgcgatggttcgacggcttgcgggcgttgaatgcctgcaagcgcgccgcagcggccaagccagcttcaagcgccgcacgacgccgcgattcttcgcgctggcgttcgatggcgtgcattacggggcggataagcccgaagtgaatagcgacagcaacgacagtgcaagcgataagaataagtgcgtacatggcggcgattcctttttggttgccagttggtacgacaaagaatacgacagcttcgaaagcctgtcaatcctttttgccgataaagtttcgttcaatgcgaatcggcggttcaggttcgggcgggttcgtcttagccgggttaatactgtccgcccatatcggccattgcgacagcgggcgacgaatgatcttcgggccgctttccatgttggcgatatattcggttacgaattcgcaatcggtgtcgtaggtttcttcggtgactttcgattgcatacgcaaccatgcggccagcattaggccgatggttacgccgctggaaagcgtgacgaagtgccaaaacagttcggcaagggtaggcattgcggttactccttcaataatagtcgtcgggttcgtagtccgggccgtcgtagtccggttcggtttcgctgtagccgtattcgcccggcccggcttcgtacaacttgtcggcgatcttgtcaagacctttcggcaagtccttgtaatcgacttcttcgccgtcgatatagtacgtcggttcgcccgcttcgctttcgtcggggtaacagttttcgggcagaccggaatagttgcccggcgtgaacgatacgccgtattcgcacgacagaatgcgaccgtcgttcatttcgaattcagttgttacggtgtatgcgcccatttcgtgccccttgttcgttgactatgggcatagtctacgacggtttcgaagctacgtcaagcggtcgcgcaagcttttttcactagcgcgatgatgcctttttcgtccttgcgtttgccgacgcatacgttcttcggcgtcgattcgcggtacaacaagaagtattcaggtttcgttacgatgaagcaacggttttcgcgtgccttcttcttggcttcgtcaagtgtcattttcattactccttatcaagtgcggttcatacggcggaagcttcgacgcccggtatagcttgtcgccttcgacgtagtaccgttcgccgtagcagtcggaaaggtgttcagctatacgcgacaacggccagcccacaattagcaggccagccgttttaagcttcgcgcgggttagttcgcatttcaggcaatccattagcggaagccttctataacttcgttcgggtcgccgcccgccgcttcgtagccttgacagtagcggaacgcctgtaccgcgtccattgtgccgccgcagttcgtgcaagtgaacttcgcaccgaacttatacggcgggtcgccgatgttgaaatgatgtttctggcaggcttcaagcttcgcccgattggccttgatttcttcgaagatgcgcggcccgtcttctttgacgaaatcgcggaacttttcggttatcggtttatcgttcatttcgaaccccattcgatataactacgaaggtagcaaacggcctgttcccaatcatagcagacggcccacccatagccgacgcgctgcgcgtactggccgaaggctatttgttcgtccgatgcgccgcccttcgccgtttccgatttcggacgaagcgaaggcttcttcatttcgatataaaggccgcaccattttacgaccatttgttgcgaatcggtcgggctttgttcgtagaccggccaaggcaagaacgtatcggcgatgccctgccgtgcgccttcggccttcatttggccgccgcgtatcttgcgcgactgttcgtcgtcgccacggctaccgccgttcgggatcgcgtggaaccattcaagcgccgggacggctggcggtgcgttcggatcgcgcttcggtagcttgccggtcttgcaccattcgtccgctacgtcgaagccgtgcaagtacgcgacagctacgtatgcgaacaatgcgacctgttgcgaatgttcggattctttcgctagtttattcggtgtcattttatgccccttgcgtcacgacagcgcccgcaggaatcgacacgttcgccgctacgcgggtcggtcacttcgacaacgcgggcgaagtcttcgccgcaaaagaagcattcgccgggatagcctttcggaatcgcggcggcaatgcggcaagtgttggcgatggtcaacgctagttcgttgtccatgcggtcggctgttgcgtctatttcgtcggccatgttggtttcgttcccctacgaagaagccccgactatacactagccggggctgtttggtcaatgtttcgtcgaaccttcggcgttgcgttcggccatgtaacgttcgattgcctgttcggggttttcgccgtccttcatctggatatgcgcgacttcgactttcacgctaccgcccaacagcgcgcccaacagggcggcggcaagcgggggtagggcttcggactgcgcgaacagttcttcggcttcggcgatggtcgccagttcttccggcttgaacacgtcgggcttgcgcccggttcgcattgtcatactacgatgaaacttcgaagctgtcaacctttgcggtaacgaagttgcttcgtcatttcgcgcaaacgcgacaggcttacgcccgcgcttgattcgatgcgaataaacttcgtcgctacgtcgtaagtatacgacagcggacgcacgccgtaaacagctttgtatgcgtccgcgtattcgttaaacgcgatcttcaccgctggcggttcgcttccagccttgcgacgcgccttcggcatcttgtgcccgttctggatttcgtacattggtcgccccttcgatgaatacgacagcttcatagccgccgcgtgttggtttgattgcgaacgcctgcggccattgcgcgcgaagcgtcaagtaatgcggcgcaaacacccgttgcagcttgcccacattggcccgcgcgttcatgccgtgcgtgcgacttcgaacacgttatgcgggtcgccatgcttgacgacggtaaaacgcttgccgtccttctttttgttctggcgacttacggccatgcgcaagtttacttcggtaacgtcggcaattggcacaaggaacgattgacctacggccagttctgcgaacgggtacgcgctacgttcggcctgttccttcttttccatcgccgccgccgatgcttgaacgatttggtacgacatttcgaacactccttaacagttatgacgtttgtaactctatcaggtgataacgggttagtcaagcgtaacgcatcgttccggggccattatacgggttgaaggggctgtagaagtcctaaaccattgaaaataaaagaaatataaaaagtataataagtataatactgaaaagtagtgttatttagtgataacggttattaggttacaagccgggggatcgggtgacttcgccgttaaactttatacttgttatgaatcgtcggaaagctaggcgtatcaaggctttgcgtgctatacgacccccttaaactttccatcgtctattatacgcgaaggtctgtcgaacgcttcggcgcaaccataggcggcgcttcgtctatactaatcacgtcgaagctatcgaagaaacgaacgacgggcgcaatcattagcgaaagccaaaacgcgcagaagataccgcgaaggatgaagcgccatgccttcgaacgttcaccgttctttgcgcagtagtaagcggcttcgaatgcagtagcggccagacgccagaacgccagcgccaacgatgcgcaaagcgcgacaataaatgcggtcatttcgataactccttcgttagaatgcgaacaaatgaacttcgcggccaagttcggcggacagccattcgccgacgatcatgcacgccgcccggcgcgggttaacgggcgctagggcgcgcgtccggggcttcttgcctgcggctaccctgtcggcgttcagggcgtcccgtgcggccttggcggcgtcgcgcttggcctgcgcgcgttcctgcgccttggccttcaaccgcgcccaagacttcggccctagatgcttgccggttgcggtgtatacggcccaacggaaccaatatacgtcgtaatcctgcaattcgccttcgttcggcggtacgcaccatttcacccattggaatacgccatgttgaaacatgacgcggccaaggtacaacgttacgtcggttccttcttgcggggcgtgaatgtaaacgcggtgccagccttggcccttgcgttcgtgctgtccggtcaagccgattgcggctagaacttcgttcacgttgtctatgcggatttccatagcggcacctttcgttaatgtgggcaggctgcacggcccctagcgcgatgccaagggccgcaggttcgttagaacttaaagaagccgggttcgaccccaagataacccccggtcgattcgggacggcgcagggtttccgacagttcgatgcaaccgacccaacggccccaagcttcgacgtagaacacgacataacgggcgggcttgccttcgccggtcttggcaaaataattgccgatgttagcggcggccttcgcggttgccttttcggcggcggcttcggtgccgtagttcttgcaagggttcttattgtccttgcggtattcttcgatacgggcggtaagttctgcgatgatgttagccatgttcgtaactccttcgtcgggttcgttgcttcgatggattgaatactacgccgacttcgaagcttcgtcaacaacttttcgaccattcgtcgggaaatacgttcaactttcgttcaggcacgaaaaagccgcccgaaggcggccagttctgcccacactatcccagccccgctacaggccgaagacgcccggatgcgcgatcatgtacgcgacggcggacgttccgtagtccttcgacagcgtagcccgcgacacttcttgcaggtcgccccgttcgcatagcgtcttcaatgcgcgcttgattgcgccagacgcgccgatgcgatctttacggaagaccgacacggcggcaagccgacgctgtacgtagctgtacggaacaatgcggttcgaatgcaagttgcttgcgccttcgcctgcatacttcgcaacttccggccaaggcgatacgacgaaatctttaaccgtcgcaattaccttcgcaagctgtttcgtttcgtcgttgtctacgccaatttcgccagcgtcgaagcgtgcaagcaagttgcgcacgtctgcaacgattacgccggttgcccatgacagaacgtccgacgtaataactgggtcgtatgggttattgccgactgctacgataccggccaactttaacgccttcatatgggcgcgcgaccaaagttggcgcttaacgtcgcggtcgctactgtttacgttattgcggcaatgttcttcgaacttgtcggaagcttgttcgacgccttcggcgaattgaacatggatcgctttatgttggctgttcagcataagcgaatgcgcgcaaagcgtcgaaaggcggtcgataagttcgaacgacggttgcacgcgcgccccggccttgttcaacggcggcacttgaccatgatattcaatcatcgtaaagcgcggcaaaagaccttcggtaatcaaaccttcgtgcaaaccttcgtaaaacttttcgggcgttgattcgccaagcaacgaaaacgacggcgcaagaactgcggtagtgttcttgtccttgtccgaatagatagacggacgaagaaccttaccttcgccggatttgttgtaagcgtccagcatgaaacggcgcagccccaaaagatgcggcggcgcgttcaagcttgccatttgttgaagatagatgccgaattcgccgaccaacgatacgaacgacgttggccccttcgacatatacttaatgatcgcttgcgccgatgcgatttcgccggggccgatgaagtcgcttgcagccggtacagtgcggattacttgcgccattagcttatcaatgccggatgcgatagcttctttacctgttccggtcggggccaacagcaatacgtactgattaaggccggtgccgctgatattgtacgcacgacctacgatgccagcgacaagaccaagcgcgccagccaacgcgatttcgggaaccgggcgcggcgcttgtgcgtaaatgtattgggcgatttcgccgacaagtccgggcggcactgaatacaccttcgacgtttcgggaatggatggcgcgacgattggcgcttgcggaacgttggtattcaacgatgcggcttcggcacggtcgcgggcttcttttgcggctattgcttcgtcaagcttgtttttcagtccgtcaatatcgacgggcggcaacatgcggtcaaaacatttgttcagcatgtacgacacgtaatcgtcacgcttcgccttgtcgcgttggcccaagccggacagtcgaaacatgcgggcaatctgcgcccggttctgcgtataaaacgcgataatatcgaccaatgcgaagtcggcttcggactgcgaagcgtacatgccttcccatttgcccgcgaacagttcggcgaacttatccccgttggctgcggcgacggcacggttataaacctgttcgtcggtttccttggcttcggcgacgcctgcgtaatgcgcaacggcgacagaaccttgccccatttggccccaaagaatgttcaacagttcgttttgttctttgataggcgcattacggtaaacatcgcccgtcatggtcatatagcgaagcgacgaatacacttcgataaacgaccgacgacggccagcgggaaccgcgccctttacgatgatatgcagccccgaaccggacggcgaacgttcggcgtagctgtcgaattcgttgtagattttgatttgacgatcaagcgccgtttgatcgcctttcgtgtcgtcaaggtcgataaacgaatacgggtcggcatcggtcaacacgaacccgattccgttataccagccggaattaagcgcgtgcaaacattcgtcaaatgttccccaagtgttcgcgtctgtaacgctggcaagtgcgccggtacgggcagaatacggaaccttagtaggtttcttcgaatccgtgtcttcgtaccgccacataacccattgcggataagtccgcatttcgataggtatgttttgatacattgttaatttgccttcttcgcaaacttcttcaaatagacgttaagcgtttcaatcgtaacgacgccggggttttcaatgtcgccgcgcgcgaaggcattaagccaagacttcgacacgcccatagcttcggcaatagtgccaacagccagcgaagccgggcggttcaacaacagttcgcgggtttcatcccgcagcttcgtaatttcggccatgttcgcaccatgtttccggttcaatgtgggcaagatgaacgacactatacccgacaaaattctagcaggcaagacaaaattttgttgacaggcaacacgcccggcgctacagtgtcggaacgctgcggcgcggtgcccggcgactttgaaaggtgcaagcaatgaacgaacccgaaaagaccttcgactatatcgaagaagcgcacgtaaccgcgtcgggtagctatcacggcgaccgcgtgtcgcttggctacttccgcgaaaccatcgccgaagctgtcgccgcactggtgaagctggacgcgatcaagaagacgcttttctatggccgcgactgcggcgttcctgcccccggcgacaacagcggcacgcttgccaagctgcccgattggatcgccaccgatggcaccgacgaagccaacgcgcgcgccgtcaatatcgttcatgcgataatcggcaaagcgaccgaagcgggcgaactgctggaagccctgtcggcgaccgccgaaggtgccgtattcaacgacgtgaacgcgcttgaagaagtcggcgacggcttttggtacgatgcgctgttgcttcgcgccatcggttcgaacttcggcgaagcgcaggccgtgaacatcgccaagcttcgtaagcggttcccgcagaagttcaccgaacacgacgcgaacaatcgggacttgttcgaagaacgaaaaattcttgaacaaaaggcttgacaaccgaaacgggccgtcgtacattacgcacataccggcgcaacgtgcggcggcccaacgaagaaaggtgcaaagatgactccgaatatcattcaggtaacgaacccggaaacgggcgaagtcaagaactacagcgaagccgaatatatcgccgaacgcgaccgtctgttggtcgattggcaggcgaagaaggccgcgcttgaagtcgccaaagaagccgaattggaagcccgcaagctggccgtgatgttcatgcacgacccggcgaagtccggcacgaccgaaaacgtcgaacttggcggcggttacaaagcgacgatgaaggttccggttcgctacggcttcgtccagaacgccgaaggcaagaccgacaaggcgcgcattgaaaaggcgctgtcgaagatcgaaaagaccggacaggctggcgaattgatagccgaacgtttggttaagtggacgccggaactttcgcttaccgaatacaagcaacttcccgacaacttccgcaagatcatcgacgacgttatcgttacgtcggaaggcacgccgacccttgaaattaaggaaccgaaggcgaagaagtaacgtacctgccgccttgcccacaatcaaggcggcattcttgacggcatcgaaagtccgggctgcgcatcgcgtcgcatagtgccataacggacagtcgggaaagcgaaagcgtcggcgtcgtcaataatgccgctttaatcggagtaaacaaaatgcaaatgtcgcagcttaaaccggcgtcgcaactggcccgacgctatggcgtaaagtccgtcgtattcggttcgcccggttcgggcaagacgccgcttatcaacaccgcgccgcgccccgtgctgttggtcactgaacccggcatgttgtccatgcgcggttcgaacgtgcccgcatgggaagcgtattccccggcgctgattaccgaattcttcgaatggtttatgaagtcgcgcgaagccgcgaacttcgataccttgggcattgacagtatttcgaacattgccgaaatcatcttggccgaagaactgtcgaaggttaaacacggcatgaaggcatacggcaatatgtccgaacgcacgatgaagatttgcaacgacttgtattacatgccgcaaaagcatatcgtaatgattgcgaaacaaggcgtcatggaaaacggacggcaaaccatcttgcagggcggcgaagtcgtatacgaaccgatcatgcaaaagcgaccgttcttccccggcaaagaccttaacgtaaaggttccgcacctgttcgacaacgtgttgcacttgggcgaagctatcgtaccgggccagccgaagccggttcgggcgttgcggacgaaggaaattcccgaagtgttcgcccgtgatcgtttgggcaacttgggcgaacttgaaccgcccgatttgtcggcgcttttcacgaaagcgatgcaataagcttttgcgccgtcgccaagcggtaaggcaccggattttgattccggcattcgtaggttcgaatcctaccggcgcagccaaaaacggtaactttgccaccgtaaccaatggcgaagacttttcgaaaaggtgaaacatcatgcaacttatccaagcgttcaacgcccaacagtacgacccgacccaaggcgtcggaagcctgccgattggcaagcatccggtaatcgtcgaatcttccgaagtcaaggccaacaaggcgaacgacggcggttatctgcaactgaacttgcggattatcgacggcccgcagcagggcacgaccggcgcttatcgcctgaacctgtaccattccaaccaacagaccgtcgaaattgcgcatcgccagctttcggcaatctgccacgtaatcggcgtgttccaagttaccgattcgtcgcagcttcacggaatcccgttccttatcgaagtcgggccgcagaagaacgacccgcagtacaccgaagttaaaaaggtgttcgacatgaacggcaacgaaccgggcaaggccggacagggcgcagccccggcgcagccgcagcaggccgccgcaggcttcggacagcagccgcagcaacagcccgcgcagggcggcgcatggggcggccagccgcagggccagcagcagcagcccgcgcagcagcaaccggcccaaggcggcgcggcatggggccagcagccccaacagcagccgcagggcaacggcgcagcttggggcggccagcagccgcagcagaacgcggccccgcagggcggacagccgggcggctggcagcagcaaccgcagggcggcgcaccggctggcggtgccgcaccttggggcgcacgctaagacgaagtagcgtagcggcgtaacatcgccggggctttcaccggccccggcgttcttttatggggaaaagcgtaagtatgtcgaaaattaaagacgcattgcccgtacccgaacaatgcgatacctgttgttcattcaacatcgaactaacaacaaacgaccggatttacggtcgccgttacggcgattggccgcatatttatttctgcaacgactgtcgcgccgctgtcggctgtcatcccggcacgtttattccgcttggtcgtatggccgaccgtgctacgcgacagcttcgaacaaaagcgcatgacgaattcgaccgtctttggcaaactggcttaatgtcacggtcgaaggcgtacaattggcttgcggcgcaactcggcatagacgcttccgaatgccatatcagttggttatcgaaggatcaacttaaagacgttgcgacgctttccgccgactatctaacgaacaattacgccgcacttgtccggcgaaaggtgaagaacgatgccaagcaagaaaagcgaaccgaacgcgcaattaacgctgaacgacgcgccagcgacgaagcccgacgccggaaggcaaaacgtcgcacttgacgcccccggcgttgcgaaggcgctttctaagcgcatccttgaagacatagacgaatattgcgttcgtacctatgacggcggccaccgctggcaccttggcgcgtcgttgattggcgacggctgcaagcgcaagctttggtatctgttccgctggacgttccgcgaacagacggacggacgcaagcaacggctgttcaatcgtgggcatcgtgaagaagcccgctttatcgaatggctggaaggcatcggggccgaagtttggtacgaaaaccgcgacggtcttatgtatcacgccgaaagcgattcgtattggattgcgaagcccggcgaagaaggcgacggcctttcgtcaccgattacgaaggaacacccgtactatacgcaacacgtcgcacgcgcgaaggcggacggcttggaattcccacaataccgcgtgtcggcggtgaatgggcatttcggcggatcgcttgacggtatcgcaaagcttccggcgcgctacggaatcgacgaacctgtattgctggaattcaagacgaacggaaccggcgcaggctttaacaagcttggcgaagccggtatgcctgttgcgaagccgcagcatttttgccaaacttcaacgtatggaagcgacgcggcatacggatttcgttacgtactgtacttcaacattaacaagaacgacgattcgttacacgtcgaacttgtgaagttggatcataggctaggccagcaaatgcgggaaaaggccgaacaaatcattctgtcgcaggaaccgccgccgcgtctttccgataatccgacgttcaaagattgcacgtattgcgcggcgaaggacatttgccacaaaggcgcgattcctgaaaagaactgtcgtagctgcaaggcggcccgtccggtcgaaaatggcgaatggttttgcgacgtgcataacggcgtaattccgcgcgacttcgtaccgcaggcttgcccgtcttacgtacctatcacggcgacaacgcaaaatgtctagtatctacgtaccgcgctggtatcaagaagaagccgaatattcaatcttcgactatttccagcgcggaaacgtcggaaatccggtcgtcgctatgccgaccggaaccggcaaatctgttgtaattgcgaacttcattcgtcgcattttcgggctttggccgaatcagcgaataatgatgttgacgcacgtaaaagaattgatcgaacagaacgccgaaaagctaatgtcggtttggccgactgcaccccttggtatctattccgcaggcttgaacagccgcgaaatgattatgccaatcgtattcggcggcgttcagtccgtagccccggcgattaaaaaggcgcttgaacagaacgacggacgcccgccgcatcttcgccatttcggatggcgtgacttgctgttgattgacgaatgccatttgctttcggataaagaagattcgttctatcagtacattatcgccgaattgcgcgcgattaacccgcatcttaaagttatcggattcaccgcaacgccctatcgtatgaaaatgggcatgattaccgataacggaatcttcaccgatatttgttacgacattaccggcgttgaatcgtttaatcggttgatcgccgaaggttacttgtcgccgcttatcgcgcgcccgacgaaaaccgaaatcgacatttccggcgttggtgtagtaggcggcgaattcaattcgaaacagcttgaaaaggccgcagacgatgacgacgtagtgtttaacgccgtccgcgaaatgatggaaatggcgtataaccgttcgacttggcttgtcttcgcaactggcattgacaataccgaacacgtcgcaaacgtgattcagtcttacgggctggaagtgttgcccgtgcattcgaagctgaaagacaaggttaataccgaacgtttgcgcgcattcaaagcgggcgaacttcgcggcatcgtatccgggcagaaacttacaacgggtttcgaccatccggcaatcgacttcatcggcgatttgaacccgacgctatcgccgggcaaacacgtgcagaagtacggacgcggaacgcgcccaagccctgaaactggcaagatgaattgtcttgtcggcgacttcgcggcgaacattcgtcgccttggcccgatcaacgacccgcgtattccgaatcgtcccggcaaaggtggcggcgacgcgccggttcgcatttgcgaagtttgcggcgtatacaaccatgccgccgcgcgccagtgcattaactgcggtgccgaattcagcttcgaaacaaagttgtttgcgacgccgggcgttgctgaaccgttgcgcagcgatgcgccgatagtcgaatatttcgacgtacaaaaggtgatatacaaccttcacgaaaaacgcgacgcacaaggcaacttgacaaagccgccaatgattaaagtatcgtacttttgcggcttccaaatgtttaacgaatttgtgatgcttgaacaccccggacttgcggcgaaacgttcgcgggactggtggcgacagcggcaccgcgaagaaccgccgccgacgacgtatcaggctttgcaacgtgtatccgaacttcgaacgcccgcaaggcttcgcgtttgggtgaacaagaagtatcccgaagttctttccgctgaatggtgaaactatgacaacgcaaattgaaaacgacgttccgattcctgcaacgccggaaaagccgaagcgcaaaagccgcgcacgcaagcaagccgaaggcacaacagcgaagaagacggcgaaccccgccgcttcgcttatcgcagcattgaagtttatttcggtcgcgcagaagaaggccgggccggtaaatatccagttcggccacattgcccacaattgggcggcggccttcgatggcgtcttgaccgtggccgcgccaattgaagaagacttgaccgcgtgtccgcatacgttgcagtttatcgacgcactgtcgaaggctggcgacgaactgtcgattacgcaacttacggcgaacacgcttgccgtatcgtccggcgtattccgggcgcttgtgccgtgcgtagcgttcgacgaagtgcccatcatgccgcccgatccgcaatgcgccgtgatcgacgaccgggttaaagcggccttggctgcggtcgcagggctggcaacggacggcgcgccgaatgcgacctatgccgccgtcctgctgcaagctggaagcgccgtagcgacgaacggggcggccctgctggaagcgtg

SEQ ID NO: 2 - DNA, 35321 bp, unidentified
  source 1..35321: mol_type = unassigned DNA
  misc_feature 1..35321: note = the genomic sequence of a bacteriophage
ggctggcggctcgccggcggtgatgcggatctcgccggagtcggggtcctgctcgatgccgatgaacttgccgcctatctgctcgagctcctcgcgggtcacgaccaggccgccgggcgtgcgggacgccacgatgccgagcagggcggtcacccgctgcagctgaatctcgtgcgggcagacgtctcccgacaggaggcgggccagcaggtcgatcgtgtcgttacggttgctgctcatactgtttggtctcccagtttatctctacggaagtggtgcccttggcgcggcacttcgccacggcgggcagcttgaggtcgaggaccttcgccacggcgggcgcgtcctgcctcgggatgtagcccagcatctgcccgcaggcgtcgtacacggccacggcgttgcggtcgtactggttgtgcggctcccgcctgagggtgaggacctcgtcggtcctcaggtcggcgatcgcctcgcgggcccccttgtggtgcacggagcccacgatgtacgttctcatctgtgacattagccctccttcttgggctgggcgcgcgggcggttcggcaccttctcgccgcgctcgcgcatgtggacggcataccagcggaggcatgccacggaggtcttggcgccgtcgaactgctcgcggatcttgtcgaggatggtctcgtaggagtgaccgtaggggcggccgtcctcgtccttgctgatgacctcgagcagcaggccctcagccacgacgcggatcacggggcccttctccttcttctccttcgcggccttctccttcttcggcttggcgggcttggaggccttgttggtcatctgcgtgagcagcatggccaggccgttgggctcctccttcgccttctcgatcttctccgacagctcgggggtgggggtgccggcgagctcgacgatggcggcctcagtcttgtcggcctccatcgcggcgatctgctcgagcagcttggccttgccgcgcttcgcgaggctcttggggtcggtgtccttgccgctcagctcgttgtggcgggcggcgatgtctgcgatgttggattcgttggacaggttcatggtgatctccttggacgggtcggttgtatcgaggacgcagtgcgtgccgtcgatgggttccattatggcgggttgtgggtgcgatagtcccaacacttgggctaccgcgcttgaatgatgggattactgtgcgtctgcgaccgtcttgaggaccttgcggaactgctcgacggtcatgccgttgattacggtggcggtggggttcttctggcggacgagctcgaggctagcgcccttgatggtgtacagcttggagtccttcatgatgcagaccttgcccttcgtgaggcggtcgtactccctcttcgcgaggatgtcagccgccatcgtgcgcagctcctcgatgttgagcagctggtaggcgtcagtgcgggagaactcgaagtggggagacacctcgtcgtccatgtcgatgacggtgcagtaggacttgccgtcgacgtacaccttggcggtgaagccctgacgccactccttcacgaggtactcgacggacttgagctcgaccttcaccttgcgggcttccgcgggggccgccaaggcctttgcggcgggcgacttcttcatcttcgagcggtagtaggacacgcaggcggctgaggtgctgccttcagggaaggccttcttgacctcagcgagcacctcgccgttatcgaggcccgccgagatgcccgcgcggatcacgtcggcgatggtcttcggctttgcgatggcaaccgtggccgcaggcgcctcctgagtggaaggcacgtagtccgcggtggtctcgatcacgcggtcgaagatctccacgtgaccctcctgaccgtagacaccgcgccaagtgcggccgttgtaggagacgtagccgtagtaggcgcggctgccctccttatagaggaagccgtccgacttcttgaggtcggacgcaccgaagtcgttggcatcaatccaggcggtgaacagcttggatgcgtcggcgagggttgccgccgggtggcgcttaccgccaaacttaacctcgaacatatcgtgcctcacgtgtttgcgttggtgtgaggtcattatatggggtcttttcccaaatgggagccccctccagcaaattattttgctaaagttccgcgaaggccagtttgggcgccgtacatataaaagagaagggcccccggacgtctccggaggcccctcaggtcccctgtcacgagttgtccccagcgtggctcagtgcacggtgggcttgctggcggtgcggccgtccttgacgttcacgtcctcgccgtcgcggcgaaggcgggacgcgtaccactggacggtcttgacggaggtattcgcctccgggtggcgggccttgatgatgtccaccatcgccgggtaggtcagggcgcgcttgcggcggcccaggatgcggacctcctccttgatggtgcgggcggtgttcggcatgactgcttctccttcgttctaatgggcggtccgggtcgtcgcccggttgtcgcatgccccagtagtggagcacggagtcagtatgcgcttacgttccgagccaaaacaccatcgttccagctaggcgagcatgctgcgattgcccaatgaatttgtcgcaaactccagcacctcctgcggtgtgtggtcagggcggagcaccgacatggccgccagctcctcctcggtcaccccgtcggccaccgcctgggccttgaacccgggcaccaggtagcggcgcacgtcggtgcccttgcccacccgggcgtagatccagcagttgccgccgcagcgccacctcttcctgtgccacactacctgggcctgccttacctcgaagccgagcttgccgccgcgcttgggccggtcgcagcccttcagctcgagctcgaagtacaggccgttccagcacccgtccacgtccgggtcgcccgagctcaccaggttctcgacccgccgcatgtgcaggccggcggtgcccttcagccggtcccgcagccactcccagagccttacctcccgggccacttcatgtcctcggtgaagacgcgcaccttgacgtccccgacggagatctgcaccggcgtgtcgccgttgttgggcaggaactcggccagctcgccggcgtgcatgccgccgccgagctccgttggcacgacggtgatgaacgcccgggtcacgtagcccagcctgagcgcggcgagcgccagggtcgggccgccgatgagccatgcgtccgggtggtccagctgggcctgccccagggacttgccaaggccgaggttctcggcgtcgggcgcgcgggtgatgcgaaccatggagcggttcggcaggcggggcatctggtcgaaggtcgtcgacccggcgagcaggacgtcgttggcgttcgacatggtgagcaggcggaagatggccttgtccgtcttgcctgtccagcgcatgtcgtcgtcggcaccgctggccaggtagccgtcgatggatgaagctagcagcagtcgcattggttgtactcctctaggtaggtgatgtggatcccggcgagggtgagcaccgcgatcgacgtggcccaggacttgccccaccgatggtggccgaggtcgggcctcggtgccaccaggcggcggacacccgcgtccctgagcttgcaggcgcaggggaggcaggggaacgaggtcacgtagacggtgcagcccgcggtcgggaagggcgactggcggaggcagttgtcctccgcgtgccgcatgtttgccagcttgaaggcgcggtcggccaggagcgacggcaggtcgggcacctccggcgggaagccgttgtaccccggggagacctgccgccggtcgggcgtcacgaggacggcgccgaccttgcggtccgggtccttcgacatggccgcggccagtacggccatgcggtagaagaacccatcccactgttcctgggatcgcttggtcggcacctccatcactcgatgacctcgggcttcgggttgtacgcgggccactggtgctgcttcgcctcctcggcgtagcggaccacgtagtcgtgggggtgctgctcgacctggctcagcgtccagcccggcagcgggagctgcggcaccacgggctcgtgctggagcatctccgccgccatctgccagtgcgactcgtacaggtgggcgtgggccagcgtcacgtgcatcacgcccggccggatgcgcagctcgtgggcgacggcgtccatcaggagcgcgtggcccatgacgtcgtacggcaggccgacgaacaggtccgagctgcggaggaacaggctggagtgcagctcacccccggtgatgctgaaggtgaagctcgtcgggcaggggacgttcttctgcccctgggcgcccaggccgtcctcagccgggtcccaggcggacacgtagcacctgcggtccgtcgggtccttgcgcagcgcctcgaccgcgagccgcagctggtcccggccgaagtggcgacgccagcggtagccgtaagcagagcgaacccccgggaatgcgacacccgacttagcctcagtgccggcaggagtctgcgggtagatcggctcgacaaacttgtcccacaacggcgcgtacctggtgatgaaggcggcgtcctgctcgccccgcacgtaccaggcgacctccgccgcggcggaccgcgggaaggtcttgcggtagccgacggtcggcaggaggccgtcgctcaggtcgacgcggaacgccgtgcctccccggccgacgtggacgcgcgttccggtgcgctcgttcgcctcgatcgggctgctgaaggcccaggcgatcagtgcaccgtagacgtcgtagaacggcatgaggacgccgctcacttcgcgcccccgaggccctgctgcttcagccactcggcgtagtaggtgccgtagttcaccaggtcgcgggcggtgtcgtacaggccctcgtagttgggctcgcggccctggcgcatagccgtgatgagcgactggatgcgcaggttcttggtgtggagcatgtgtgcgtaggactcgtggccgaacgggaagtaggcctcgcgcccgcccgggacgttgttgtagtcctggcccttggtctcccgcaggtgctgcagctccagccacaccgggctgatggcctcgcggccctgggcctgctggcgcagctcctggagctccgccacgtcggacaggtcgaaggtgagcagccagtcgtggttgggcggctgccagccctcgggcttgacggcgtcgcggccgttccagccggggcgcttggacaggtcgccgcgcaccttcgccatgttggcggcctgcaccgcgtcgaacacggccagcggtggcacgcccatctcgacgaggcggcccagggcgaagtagatcaggtccaccagggcgtcggcggcctcgagcacgtcgccgtcagcgtgggcgtccttgaactcctggatctcctcgttcagggcgtcgaccgaggcgtccatgcggatgctggacaggatctccggggtgcccgggatgggcgtgtccaggatctggacattgaactgctccgctttcaggagcatgcggctcaccagtgctgctaccagggcctggtgcgggccggtcgtgtcgatctcatccatcttgctgcttcctcagttgttgaaggtaccacgtgagcttgccgtccgtcgggtcgacgtcggtcctgccgtctacgaaaatcgcccagctgtcggcggcgtacttgccgcagccaggcagggactcaatcttgacgcttcgggggtccacctcgagccaccgagctgcgagcctggtgagagtgacggcccggcggcgccacagccccaggggccggagcgcgtcgtgcaggtcgtcgggctctgcccgggacagcgcctccgggctcgggtagtccgccatcaggcggtcgagcgcgggccgggcctgccgccaggtcgtcaggttgaccaggctgcaggcgaccagcatccagaacggcgtctccctcagccgctcctggaacagctcgcccgcctcgggctcgtcgccctcccaggcctcgaccctcaggaggcggccgtggcggcgcaccctccagcgcacctcgttcatcgggccgcagcctccctgatgccccgccgggcggcgcagaccagggcgtccaggaactggcccgaggggctgccggccagcgtcacctggcaggacgcgccgccgcgggtgacgcggacgatgaggtggtcaccccggctgaaccgtacgggctccacctggaacccgtcgcgctcgagggccgccaccccctccttgtgcgggcggagctggacgcggatgcccatgctcaggcctccgccgtcttcttggcgcgcggctgcttgggggcaaagcactggtggccctcgggcaccaggaggcgggcctgctggctgtcctcgctcagctcgtagcccagcccgttctccttgttgatggtgaacaggtgggacagcacggcggagcggtccaggtccagctgcgccatggcgtccgcgatagggaagaagcccgagacgaagagccgggccaccgtggcgcgcttgccgggctcggggatcggccggagcgcgtcctggttgatcggcttgccgctcgtccgcttcttgggctcgtagaccgtgccgtcctcgttgaggcgctgcggcttctccggcttgggctccttgaccggctcgacgtatgcgaacaggtcgaagccctcgggcaccagcaggcgggcgcagtcgtttaccagctcgtagcctacgccgtggtcgcggttgagggtgaacaggtgggagagcaccccggagcgggacagcccgaggcgggccatcgcctcatgaagcgactggggctcgtcgtgcaggaagaaggcggcgacctggccgcgcttgctctcggggcggcacgggcggagggagtcctcgacgatcggcttgccgccgcgcttggagtcgtcggacttggacgggtcgggcggcgggggcaggaacttgggcaccgggaaccccatctcggtgagcaccatggcggccacgccgtagtccttctggaatcccagcttgacgcaggtctcccaggccttctcgatgtggtgcgcgatcttggacggctcgacgtcgaagcgctccgccgtctggagctcgccgcactggttgctgacctggaaggcctccagggagtgggggcagaggatggtggaccgcttctcgcccttaatcaccacgacgtgggcgaagccgctggtcggcgggtcggtgatctcgtaccggcgcttccagaagttgggtgcgccgccccgcacgaagtagaccttggcgaagacgatgttggctggcagcatggtggacgtccatatagagaaagggacctggtctgcaccaggtccctctatcttatggcgggggccgcgccccttaaaccatcatttccaggcgaactgcccggccgcttcggtgattactcgaagatgcccttgtcgccggcggactcgccgcgctgggcgtccgcttccttctgggccttggcttcggccttggccttgtcggcggcttccttcttggcctgcttctcggcgtccttggcggccttcttctcggccttggccttctcggcggcttccttcttggcctgcttctcggcgtccttcttggccttggcctcggccttggcgtcgcccttcagctcgcgggcggtcggcaccttctcgccgtccgagcgcagcttgttgcggtaccagttgatgctggccatggaggtcttggcttccgggaactgctcgcggatggcagccagcacttcttcgttggtcttgccgtcgcggatcaggcccttggcgatctcgccgacgcccggggccttcggagcctggtccttggtctcggtcgcttcgccggaggtctgggtgctggtgtcttcgctcatctgcatctctccttcagagataggtgttgggattggactgtcgccgcccgttcgggcggcttgcccggcgtgcgtcagtgggtgtagtttaacgccgggctaattgtcgtggagccgtcgttcgcacgtccggccgggagtatcacagctgctgtctgaacagagccagcagtcggtcgcgcaggcctcttccggctagctcctcggagatggagcgcttcgactccaggttggcgaggatgtactcgtccaccgaggccggcgtgacgtagtccctgatggtgacggtcttgccgccgatctgggtggcccgctcgttggcctggtcccgctcgatgaggtcgaacgtgtgcgagtaccagaggatgacgtccgccgccgagaggtccaggcccgcgccgccggccttgggctggccgacgaagaccttcacccgagggtcgttgttgaacaggtcgatggcctcctggcgcttcgcctgggagtgcacgttcccgtggtactcgacgcaggcgatgccggccttctccagggtgcgcaccacccggcggatgtcctcccggaacttgcaccacacgatgcacttccggtccgactcgcgcacgtcctccagcattccctgcagcctcgggttctcctcgtcggagaccaggtcgcgcacgttgccctcggagtcgatgacccagccgctgatgagctgctggagcttgatgatccgcgcaccgccctcgaccgcctccacctcgccgccgtcctcgagctccaggatcatctccttcaggagcttcttgtactgggcctgcatgtcctcggacaggagcaccgtcctcgggtccatgagcaggtctggcatgtcgtcgacgtcctcccggagcacgacggaggcccacctggacatcctggcctgcaggtcgtcgaggttcctgtagtggtccaggcggtcgtaggacctgccgcccttggtcttctcctgcacgtagtatgcgtactggctctcgaactccccgaaggtggcgaagcccagggcgtggtcctcgagcagctcgaactggctgtacgcggccagcgggctgttggacaccgaggtgcccgtcagggtgcgccgcaccctgcagtagcgcttgagcgcccgtgcccgcttggtgcgcttcgagccgggggaccggaagtcgtgggactcgtcgaccaccagcatgcaccggcccttgtgcttctgcaggaacttcttgatgagcgcggccggcttgtcgtggatgatggactcggagttgacggcgagcaccgacaggccggactgggcccgcaggacgcggtccagggacgccgcgtggccgggcttgctcgcctcgctggcctgccaggcatgggcgacgtactcgacgccctcccacatgtggatcggcagctggcggcgcacccagttgacgtgcacgccgttcggggcgagcaccaggatgccggtgatgtcccccttctcgtaccggtagcaggccaggtcgagcaccgacttggtcttgcccgtgcgcatctgccacagcagggcccgggcgtcgtcgtccctgtggcggtcccactcgtcctgctggtgcttgtagttcggcagcctgaatcggggcgcccccgcggtgcttactggtatcacttgcggtacctcattccggtccagccctccgctttcaccgggcacccgtcggcccacggcatggtgtaggccatcgtggcctcgaagtccttgacgtcgccctggtccatgtcgcactccgcgatcagttcgtcgtgcaccgacaggatgacgctgtacaggccctcctcgtggcaccttagcatggcgtccgccatcaggtcccgcgcggtcgcctgggtgatgttctcgacaagcatgccgccgtaggtgtcctggcgacgccacttcttggtgtacgggtccacgcccatgtaggtgagggcgggcttcttctcgccccagggcgtgggcttcatgacgacccgcgggtcgcagtagcccagcagcctgccggacggcagcttgcagtgcaggaagccgtcgaagcagcaccactgcaccttgccgcacttcacgacgcggcccggggtccggacggcggcgatcgccgcggcctcctggtcccaccacatcttcttgacccgccagaacttggcgcggtaggcgtcgacgatcttctgggcgaactccagctcgatgaagatgccgtacttctccgccagggtgttccggaacttgttggcccccatctggtagcccaggcccaggaccgcctgcttgcccatctggcgctcttcggcctgcgcctccttgtcgtggatcaggcggccgtagatctcggtcgccatcgccatgtagatgcactcgttccgccggaacacgtccagggcctcgtcgtcgcccgccagccagagcacgacgcgcgcctcgatggcggcgtagtcggccaccatcagcctcttgccctcggacggcacgatcatcccgcgcagggcgtgggacagcagctccatggcgtccccgtagagcatctccatcatcgccaggtcgcgcgacttgatgacctcccaggcgagcgccatgttcttgatgttgccgcgggggaagttgtgcggctgcaggcccgcgccggaccaccggcccgtgcccgcgccgtggtagagcaggcctccgtggaccttccaggtctccgggtcggcccagttctgcgccgcaatgaacttggcggtgcttgaccgcccgagggccctgacgagctccagggcgcgcctgaccctcggctccaggtcctcccgcttgagccacgagtcgatggtgccgccctgggtgttctcgatcggcagcccgttgtcgttgaaccactcgatcatgcgggcgcgctgcgtcgccttctggacccggccgtcggtgatctcgaccagctcggcgttcagctccgtgtagatgccgtcgacgatctccagcgccgcctcgatgccctcccggtcgagctggaacccgcgctggttgatcgcctggtccatgaggtacatctgcgtctcgcgcggggacaggtcgcgcaggcggtccgacacggcctcctcggcgaggacgtccacgcggcagtaggcgcacaggcgctccagcagctcggcgctctcgacccagaacaggggcaggcggaagacctcctcctcgacgtccggggtcggggagtgggcgacggccgtgtaggtcccgtcgtcgttcgcgaacaggtcgatcttgtacttcttggcgggcagcggcagggtgccctcgtcgtcgatccaggcgaccacgtcccgcttgagcggcttgcgcggcttcgccatcttcttcatgatcttggcgccctcggtgtccttctccaccttcagggccagagctggcgccagcagctccagcttgcgcggaagggagtacgccgccgccttggcggccgagcacctccactgctcgtggccgaccgcgggccagcccatgcgcgggacgcagacgttggtccagatgccccgctcgaaccaggcgttgtgggcctccaccaggcggccctccctgatccactcgaacagctcggcgagctcggggcagtcggcctcctcgacgcccaggtgcgggaaggcggggtgccacagggccgtgcggcccttctcccagtgcggcaggcggaacgccaggcacatgacctgggtcgtggggtcgagggagtaccgccaggagccgcagtccttgatggagcacgcggagcgggtttcaaagtcgatcgtcgccttgggggcgttcgtctcgtagtggatgcccgccgtctcgtacaccgaggcggaggcgatcttgaacagggccgtcttgacggccgcggctacctgggagcgctccggcaggtcagagacctgcgctggctctttgttcggggcgattaccatggatcctccgggctagccgcttactgtatcagggcggctcattgaagtccgccatcatctcccagtgtttgaatacctcgccggcgcggatgcactcatccctggtcaggttgcctatgtggaactcctcaccctccggcatgcccatcatcctggacagcatcttgtaggtcttgaagcgggacatgtgcccgtccttccagagcgggtctatcatggcgtgcagggcggacctcagcgccctggtctctctgtccgccaaggtgccgatggggtagaccgagtgcgggtgcaccccgcagtaggccccgcaggacatacacaggtagatccagggccactgcccgacaggctgcttgtagactacctcgttgcccgtcaggacgaccaggcgctcgccgcagctgtcgcatgcctcgggcgggtcgcgccagtgcttgaaccgcttcctgcggtggtatgccgagaacttcaccagtccacctcctcctgcacgatggcgcgcacgtatgcgtcgaccacggggtccgggtcggccgtgacgcccttggcgaccgccagggccgccttctcaagccggccgacgtcgatcgcacctatgcgggcctcgcgcaccagggcgttcttggtggcgtacagcggcttcagggccgtgagctgaacgcgcgacagctccgtccaccgccgaccgatcgaccggaccacctgggacagcctgacggtcctctcccccggcacgatgcccgtgtcgtcgacggccttgccggcgaagtccgccacggccgccaggtccctgaggggccaggcggcgagcgcgcacagggggcacggcagggagtgctggtggtcgtcgcacttcaagggcgcacctcgtaggcggggtccttgatgagctcgtgggggtagtagaagacgcagctggaggccccgtcgcgcttgacccacacccggccgtcgggcgcgtggaactccaccgccccgcgggcgcccttgtggaagccggcgtgcggcgccacgatgatccgctggccgaccccgaagtgctccggctcgtcggggtccatctgggtggggatcggctcgaccaggagcctgccgccggccttcacgacgcggaagggctggctctcggggatggtcagcagcttcgagccgaagccgccggtcaggatgtaccacagtacggtcttcagccagctcatgcgatgtgctccagtgcggcctgctgctcttccataggccggtgcagggtgaagccggcggccgcgcgggcgcctgcgtggaatgccccgccgtcaagctccttcttcttgaacgcgtcctgctggacgacgccgtgctcgtagatcctgtcgcagtgccgctggatggcgcggtcctcggcctccgtcggggcgatggcggagatctggctgtacacggagttgagccagccgatgtggaaggcctggcgcttgccgccgtcgcccttcatgtcgggccggcgggtcagcaggtcgtcccacgaggcctgcatcgcccgccacaccaccttgtgggcgtactcggccagcatgacgcggcccttggggccgatgtagcggacgttcaggcgggcggcggagccggggttccgctcgaagacggccttgacgccgaaggcgcgctccatcatggtggccaggttgctcatggtgcggcacttgccgaagccctcgcgagtcttgacgaccacgtcggccgtgtccaggccgtccagctcgtcctcggtgatgcccagctcggacatgatcttctgcgcctgccggagcgccgcggccgcctcgtgcggctccgggctcttcgagagggccatgcacttcttcagcttctcggtgagccgcttcctacgttctgcgtccatcttcactcctcctctttggtgaggcccagctctttggctgacgcccagattgagttgccgagctgcggggaccgcgatcccctgacctcggagcggtcgtcgccgtcgtacagcgcccagccgcggtcgtccttgaggaactggtagttagcctcctcaatgaggtccatcatgcgcttcgtggggctcacttgaaccccagcaattcagcgccccgctggagcagcgacttgcgctctgccgccagcctggcgcgggcccgctccagggcctcgcgctggccgggcacgggcgccaggacgcgggcggcttcttcacgccagcgctggtcttcgttgcgctggtccaccagggccaggttggcctgccagtctttgctcacggtctgtgctccgaaacagtgtggggctatcatgccggggctttccgccctgggacgccatcaaacgggcaaaaagaaggggacccgaaggtcccctcctggggcttacctgcctcgtcggcggtactgaccggggcggtcaggctggacccgtcagtccaggaagctgccgccgcccgaggactgctcgccctcgccgacgaagtcgtcgacggagtcgaagtcgttctcggcggcggtgcggccgctgaacgccgcgccgtcgcccagcttctgcacgttctgcaggccgaaggcgacgcccttgttgccggccttgtcgtagccgtaggccgtcagggtggcgcgggcgtagcagccgctgtagaagccgtcctcggacacctcgtcggtgatgaggcgattcagctgctggtcgacgcagcccggctgcatcttggtggtggcggcgacgaacaccatgccctcgtagccctccagctccgacttctcggcgccgtcgcggaaggggttgcgcaggccgtggtaccagccgttgccgtccggcttgagcttgtcgccgaacttctccttcgccgcggcgtgggccagcttcttcatggcctcgaactgggccgtcttgcgggccgccgcgtcgaacagcatggtgacgccgtacttggcctcgccggtgctgccctccatcgggggctgcggcttgaagatccaggcgaagctggcacggaacttcggggaggtgaccttgcggtcgttctgcttggctgctgccatttgatgcgctccttagtagcgatttgactgtttagcgatgtaggtggagtctgccccggtgccgggtctgtttgccgccgagacgcaacccgagagggaggcggtggacggcgacaccggggcaggcgctcattattccggggtctgcgtctcgtcgacaccaccgagcggccggtcgagctcctcgtcggtgaagcgccccgacacgacgctgaccaggccgatgccgtagtgccaggactgcgccgccgacaggttgtcgcgctgcagctcggccttgtccggctcgagccgcccggaggccacggcgcggtcgagggtgcgccgccaggcagccatggtctccgcctcggtgcgcgtcacccacttgtgcgtggccgacgccgggaggtcgtacagcggaccggtcatgccctgcaggtggtgctcgaacgtcttgccgccgatgtggacgatgaacggggtcacgccgtcgcggctgttccacaccttcagcacctcgggcgcgtccggcttctcggcgttggtctggatgtaggtcatcagacggaacgcctcggcgtgctggaagttcggctgcgacgggtcgacgttctccgtcgcctgcttgatggtcttcaccagggcgcgcaggcggaccacctcgcgggccaggtccttcttgccctgggcggcgaggcccctgaccatgccggactcctcctggatgaagtcgagcatggcggcgtggagcgcctcgcgatggaaggccttcaggtcctccttggtggggttgccggcgcgggcgcgctccaggcgctcctctagggacgggcccctgtcggcggcgcagtcctggatcagctcgcgggagcgctcgatctccctcaggtcggccttggtgagttcctgcatgggcttgtgttcgtgcatggtgttctcctggtaaaaagaaagggtggaagcacatcatgcttccaccccgatccaactagagccgttagtccgcgctctcctcgccgtcgtacgcgtcgaagtccccctcggccgcggccgtcgcgtcgaccgcctcccggggatcgtcgagcgcggccacggtgatgccgccctccggcttgaacgacacgcccgcgacgagcgccttgatgtgcgccgccggggcgcgcacgccgtcggccttcagcttggccatcagctccggcgggcggaccgcctcgatcttgctcggggacttgggcttcggctcctcgaacatcatctcgcgggggatgccctcggccgccaggacgtcgaaggccgacaccggctcgcccgtcacctcgtccaccaggtcctggcggaaggcgcggttcgacttcttgcgtaccagcttgccaaagcaggcctgaccgcctggggtctcgcgcaggcgccggagcacctcggtcttcgccgacttgatgaatatgtccagcagcgggatggcccgcatccggagcatcaggtcctcgtcgctgtcctcgggcccactttgcaccacggtatcctcggtgaagccgtccccgaactccagggcggcctgggagaaggcctcctcgcgcagcgccgggcacacggccgccgccttgcagaaggtgcaccactcgcccgccctgagcggggcgtcgggctcctcggtggctcgggccgcctcgcgcagcctggcctcgaacgcccgcagggtggccttgtcggtagaccagcgtcggaccttgccgtcctggtggcgcgccctgggctggacgatgaccaggtccagggtctcgaaggcccaccggagctcgtgcgccttgcccagcgcgtagtacagctcctggtcgttgtcctccacctcgacgacgacgccctggccgtgcttgtagtcgatgacggagacgtggtcgaagggcaggtacagcgagacgtcgttggtcccgaacatcgggccccagcacaccctgccgtccatgtggaacaggtgccccagtgggaactcgtcagtggcggcgtagtggatgccgctcgggctgacgtaggacgggtccttctcccaggcctcgaagtcgaagtcgaagccgatcagccagttgaggctgaactggcgctcgacctccatctcggcgtgcggccccatgcgctccatctcgtcgcgcacggtgtccaggtagacctgcaccgcgtccgccatgtcggcgtcgatcgggaagtcctcgtggcccgcgggcggcagcccgtcggccgaggcgtgcaccgggacggagacgtcggacgccgccacatccagtacggagttggcgggccggtgtaccgtggcttgctcggtcgggtcgaggcggacgtagccacccagccactcccaggcctggctgccgtcgagcaggcaggcctcgccgagcgcgtgcgcggcggtccccagccgtgcggccggggaggagttgttggggcgcccgtgctccattcgtatggagcccaggcagttcatccaccgcttcgcccccgacgcgtttcttaccgcgtggacgcttggcatgtcagttcaccagtgcgagctggatggtggggtactcgaaggtcacgccgcgcaggtcgtcgatcgagaagatcgactcggagcgcacgccgcggccgtcggggtaggagaggaaggtcacgtcctcgccgtccttgaaggactgcacggcccggtcggcctcctcgcggaggaccaggaaggcggtcggctgcggcaggcccttgaaccacaggaccagctgcgcggcgtccttcgggagcttctggttgggctgctcgctcatcagacgctcttcccgtcggccttgtcgatcagcttctgcagggcgtccggcccctgctcggccaggtcgctgacggacttggcgttcaggctggtcagcaggtccatggccgcgtcgttgccctcgatggccgcgtacttcttcagggcggcgcgggcgtcgtcgatggtgaccttcttcttgtcgtccttcgggggcgcagcctcgggctcggctgccggcttggcagccttggtctcggccggcggggcctcagcagccttcttggtctcctgcttggcctgcttctcggcggccggctgggaggtggtgcccgggtcggtcagcaccgcggtgttgttgatggccgcaccgaagatggcgacctgcacgggctcgccttccacgttcgcgatcaccaccccggtgtcattcatgtccttcagcacgtcgaggatgccctcgagcagggcgttctgcttcgcctggttggcgaggctctgctccatgaaactgttcacgtccattgcatgtgctccttgttgagcggttggtagggagtgacaatgtaccgtccggtgtccgggcgcggagccaccgtccgcgggcgacggcgccctcggacctgacgcattgcgttcgtcggtttccgcaatgcactgcgtcgtcgcactatgctcatcccggcctgccgccggcccgaccaagatgcacccacggagtacaggggaatgagtttgaatcagcagatgtccctccgcgtgtcggaggaccacagggaggtggtgaggagcaagctggaggagatgcgccgccaggcacccgacccggacaaggtgagcgaggcggacgcggtccgcaagatcatcgaggaagccgccgccaggaaggtggcacagtgagcgcactaaagcgaccgcgcacgggggacatgcgcgcgtacgtagagaacggcctgcagctcatcccgctgcacaggtacgacgcccaggacgccaagggccgccagcgaggcaagaccccgcgggacggcgcctggcaggccaaggagtacgactcccgcgcggtcatcgagaccgccgagcggaccggcgtcaacgtgggcgtacgcctgccctcgaccgtcatggtcctggacgtcgacccgcgcaacttccccgagggccgcgactccctggccgagctcgtcgccgacacgcacctggacctctccacggcgccccacacgatcaccggcagcggtggccaccactactggttcaccaagccggcggacgtcgacctgctcgactccctggaggactaccagggcgtggagttcaagtcccgcggccgccaggtcgtggccgccggctcggtgcacccgtgcgggcagcactacgagtgggacgacctggccccgtcgctcgacgagatgccggagatgcccgccaacctgatgcgcctctgccgccggcccaccagggcgcacggcgaggccgcgggcctcggcgagctcacccccgagatgctggcctccaccctggagcagctggacgcggaggacttctccgagcacgaccggtggcgcgacctgatgatggcctgccaccacgccaccaacggcgagggccggcaggagttcatcgagtggtccacccaggaccccgagtaccaggacgacgcctggatcatcggccgccggtgggactcgctgcacgccctctcgggccgcggcggccggccggtcaccatcaagttcctccacaaggtggtccaggaggtgggcggcgaggtgacccgcgtcgacgcggccgacgacttcgacacgtgggaggaccccgacgagctcggccagggcgtcgacgacgaggtgctgcgcgccgagccgaagctcgagggcctggcgggcgtgctcgaggagatgaacgagacccactgcgtcgtgatggagggcggcaagttccgcatcttcacggaggagctggacccggtcctcaagcggccgttcttccagcgctccaccaaggaggacttcgagaacctctactgcaaccagctcgtggagatgcacgacaagctggtgaccaagtcctcgctgtggatcaggtcgccgcaccgccggcagtacaagggcatcatcttcgaccccgagcagacgcacgagggctggctgaacctgtggcgcggctgggccgtgcagcccaagaagggggactggtccctgctgcagcagctggtcctggagaccctgtgcgacggcgacaggacctcctacgagtacgtgatgaactggctcgcctacatggtccagcacccgtcgcaggccgccgaggtggcgctctgcttcaagggcgagaagggcaccggcaagggcaccctgggccgcgccgcctctttcctggcgggatcgcacggcctccagatctcctcgcccgagcacctggtgggccggttcaactcgcacctgcagaactgcatctgcctgttcgccgacgaggccttctgggccggcgacaagtcgggcgaggccaagctgaagcagctggtcaccgagccgaccatcgcctacgagggcaagggccgcgacgccgtgacgggcaagaacatgatccacatcctgatggccgccaacggcgactgggtcgtgccggcgggcctcgacggcgagcgccgcttcgcggtcttccaggttagcaacaaccgccgcggggacaaggagttcttcagccgcctcaacaggcagatgtacagggacggcggcatccaggccatgctgtacgacctgctgatgcgggacatcgacggctgggcaccgcgggacgacgtgccggccacgtcggccctcgtggaccagaaggtgatgaccatggacgacgtcgagcggtggtggtacaacaagctcctcgacggcatcctcccgaacgcccgcagcgactggcacgagggcgcggtcaccatcatcaaggagcacctccggtcggactacgcggagttcgccaaggaccagagggtgtaccgccccgccgacccggtggccttcggcatgcggctcaacaagctggtgggcggcaggctcgagaacacgcaggtcaagccggcggacgacgactacgcggtcaaggtagaccgcatgggacgcgcctccgcgtcgaagctccccagcctggaggactgccgcgccatgatggaggccaagctgggcagcaagatcgcctggcccaaggacgccctcgactgatccgggggccgcggtcggccacggtcggcgggagtacgagccttctgagcccccggaaagccaggctcagacggccgaacgaggcgtctgaggcttacggatcaaggacttagctccggaatctgaggcagacggaccgtacgaggctttggctcggtgttgtaccaggaaaaacgacaccgagaccatgacggcaccaccaccgagatgcctagacggtccagaacctcagacagttgccgaaatctgcatcagaatcatagttttatcttatctagatctttttaataaaggtttagattgtataagcctttaaaacagatcttcctgctaaatccgctaatctaggccttttggtggacacggccgacacggtccgccctgggcaacacggccggcaaacctgcagggcaattccccgcgatcggtccgaccgtggccgagcccggacggtggccgagacggtgggcccctcaaaagctccgcgtccggatcgtccaggcgcggtccccagagcctcgtgcacgaggaaccggcgggtcgggcccgggagaccgctggcttactgcccggcctgggcggcggtaccatcggaccattgcaccagcacagcatacggagcgcctagtgagcgtcaagaacatgaccgaggacgagcgcctcttcctcagcgagcggggcccggtctcggagctcgagctcgtcgagtgggagctcgagggcctcaacacccaggagcgcatgtccgccgagcggcgccgcctcttcctgcgggcgttcgcgctccgcggcatcgtcctggacggctgccgcgcggccggcgtgtcccgcggcgccgtggagcactggagggagacctccgagtggttcaacacgatgttcgagatcgcccgcgaggaggcggccgaccgcatcgaggccgaggcgttccgccgcgcggtcgacgggtacgacgagccggtcatctaccagggcatgacgaccacggtcatcgacaaggtcaccggcgaggagaagcagctggtcgtcaggaagtacagcgacgccctgatgcagaccctgctgaagggagcccgccccgacaagtaccgcgagaaccacaaggtcgagcacaccggcgcggccggcggcgtcctggtcatcccggccgccatcgacaaggacacctgggcccaggaggtgcagcggcagcaggccaagtacgccgggaacaacgagggcggtgacgcgcccccgcccgcgggataatcgcagagcagcacaagccgggcgccctgatgggcgccctttccacaccccgagagatcaccatgtcctacgaacccgtacccaccggccgcatgcggctgagagcgcagcccgccgcgggctgggccaggctgttcggcgccgagccccgcctcgtcctgcaggtggaggtcgacgtgcccgacggcccgcccgacgccaacggcctgccccagtggctcgccacccgcacctgggtcgacgcccgggtccagcaccttcccatcatcccgctcgacgtagcctgaggcccccatggacatccagcaagccgaccacttccccgacccgatcgaccgcgcctcggccgagtccctggcccacgacgaggcctccatagacgctgcccgcagggcggccgaggcccgcaacaggcgatgggcgccccgggaggacggcgactgcgcctgcgggtgcggcaacgaggtcgacccgcgcaggctggccctgggctacggcctgaccatcgagtgcgccaccaggatggagcgccgctgacatggagaccccgaccaaggagcagaccgatgccctcctggcggaccagctgcgcgaggtgcgggtcgcatgggcccggcgccgcgaggccgagtcccagctgagccgcctcgccaagtacaagaccatgaccccgggcatgagggacgaccacaagcgctggctcaagcagctcatgtccgccaacatcgtcatagaccgcatcctgggagcgtgaaccgtggccgaggtcaccaacatttccaagcgccgcatggagcgggacgtctactcccgcgaccccgacgtctacctggaggcctggctcgacgaccggggcgagatcctggcgacccaggtcaggggcacctggcgagccccctccgagaccgggcgccaggcccacgacctggcggacaccctcctgggcatgtcctcgcagggcgcgtccatcctgggcgaccagaactgggaggccgagccggtcttcgcggcccacctcctgcgcgggggctacatgatgacccgcgccaggcgcttctggaggaccgaggccagggagcccctgggcaagcgcctcaagtgcgcctggtgggtcgcacggaacgcctggcgggccctggggaccgtcctggcggcctgctactgcctggtcctgcaccccgacagggccttcccggccgacgaggaggactgatggcataccagccaccccactggcgccgcaagaagaccccgcagcaggccgcccaggagggcccacggaccaaggcctggatcccccaggccggcagccaggtcctcttcctgacctgcccggtcttcgagtgcctgttcgagggcacccgaggcccgggcaagaccgacgccctcctggcggacttctgccagcacgtgggccagggctacggcgccgcctggcgcggcgtcctgttccgcgccacgtacaagcagctctccgacgtggtcgccaagagcaaggcctggttcaagctctggttcccgggcgccaagttcaacgagagcgactacgtgtggaccttccccgacggcgagcagctcctgctgcgccacatggcgaaggtcgacgactacgacaactaccacggccacgcctacccgtggatcggctgggaagagctcaccaactgggccacctccgagatgtacctcaagatgttctcctgctgccgctcgacggtgccgggcatgccccgcaaggtgcgcgccacgaccaacccgtacggcaaggggcacaactgggtcaagctgcggttcaggctgcccggcatgcggggcaagatcatcaccaccccgggcgagcccgaccgcatcgccatccacggccacatcagcgagaaccgcatcctgctggacgcggaccccgagtacatcaaccgcatccgggcggcggcctcgaaccccggccagatcgcggcctggctcgacggcagctgggacatcacctccggcggcatgttcgacgacctgtggcggacgcagacccacgtcgtgcggcccttccaggtaccgcgcacctggacggtggacaggtccttcgactggggcagcagcaagcccttctcggtcggctggtgggcggagtcagacggcacggacctggtgttcccggacgggcgcaggatgcgcacggtcaggggcgacctgttccgcatcggcgagtggtacggcctcaagaagggcacggagaacgagggcctcaagatgctggccgcggacatcgccgagggcatccgcctgagggaggtgggcatgggcctcgccggccgggtcaagccgggccccgcggaccccgccatctggtccgaggagaacggcaactgcatcgagcgcgacatgcgggccaagggcatcaggtgggagcgggcggacaacgcgcgcaagcagggctgggagcagttccgtaagaggctgaagaactccctcaacctggacgagatggacgagcccaggcccaccgtgcgcgaggcgcccggcgtgttcgtggtgggcgagcgctgccccgacttcgtgcgcaccgtgccgcccatgccgcgggacgagaaggacccggacgacgtcgacaccgacgtcgaggaccacgccggcgacgactcccgctaccgcatcatgcacaagcggaaggccgtccggcagggcagcttctgaacgacggtgtgcgggccacggacggcccggcatcattaccccatcctccgacacgctgaccgacgagacagcgctaggctggcaccgagtaagaggcgacgcccacgatctagcggtccaggggctgaccatccgaaaggtccacgcagcaggatcaacctcccgtcacgtccccgcccggaggtccacccgagggcggggacaccatggtccaggtcgtctaatgtggattaggacacctcccggttaggtttgaagccgccaggaggagaagcaggcccgcaacctgcccaggacccacccaacagtctgtaccggcgagctcccttatgatgttcacaggagtgcacgcctgagcaggcccgacgacgacccactccccgggtaacggtcgcagagcctgcaggagccctagggagctccccggtgcagactggcaggacaggatcggcgggaccactccaccatgggggagtggagcaaactgtcgtccagcctggcgggctataagcgcctccgacccctgccagcaccctcgaagcccccgccgatcgggggcttcgccttttgtggagttcgatggcgttcggccacggctgggcccggtaaactgagctccctaccaaggagtccgaccatgaagaccttcgacccgggcgccatcgtgccctaccagatcctgcccatctccgaggaggaggccaccaagctggtggacgagcgcaaccaggcacgtcgcagccgcggcggcctgagcatgctggccgagaagcaggagagcttcctgcgggcggtggccagggagcgcgccgaccgggcgtggctcgaggccaacacccctatgggcaccgtgttcgacctgctgggagtgtcccacatggtggtcagcgtgccccactacatcagcaccgcggagagcccgagctggggtccgctgatggtgaacgtgatggcccccgacggccggggcggcatcgaccgctccatcctgagctgcgcccagctgcgcgccatactcgagcccgggttcacgcggccgtgaccgcctactcctccgtccgcaagggcgtccgggcctggctcgaggccaacccgggcgagcactccatctcccacatcgcctcgcaggcgggcctcgaccgtgacgcggtcacggacgtcctgggcaagatgcgcagggcgggggaggcgtcctgcaggccccaggggcaccggaagctgtacaggctcatagagggctccgtggacacgtccaggaaggtgggcggccgagaccgcgaggccaagcgggagtacgacaggctctacttccagcgcaagagccaggagctgcgccggcagaggctctccaggctggcggacgaggcggcccctcagcccgagcagcccagggaggagcgcgccgagaccgtggccgagttcaggcgccgcggcggggagatcgagatgctctcggcccactgggactgaacgacggcccgcggccgacgcctcccgcggcatcatgcgcctaccgggtctggacagcccggtcatggtgattccatcggttgagttggaagggctgagagccccgatcccacaagggtcggggctttctttttcgccggctcgcgctacgagcgtgcgcgcgtcacgatgcgcgctcggcccgacgcccgggccaaggcccaaccaccggagtgaatccatgatcgaccctaagacggggattgtcctcgaccccgcgcgcgacgccctgctcaccgagttcggcaccgccaccctgtccaagcagtactgcctccccggcgagaccttccagcaggccttcgcccgcgcggccaaggccttcagcggcggcgacgacgccctggcccagcgcctgtacgactacgccagcaagcagtggttcatgttcgccaccccgctgctctccaacggcggcaccaaccgcggcctgcccatcagctgcttcctgaacgacgtcgacgactccatcgagggcctggtcgccaacttcggcgagaacgccctgctctcgaccaacggcggcggcatcggcaccaactggagccgcgtccgctcgatcggcgaggtgaccgccaagggcgtggacacccccggggcgatggccttcatgcacgtccaggactcgcaggccatagcctaccaccaggggcgcaccaggcgaggtgcccacgcggtctacctggacgtctcccaccccgagatcgtcgagttcatcaacatgcgatcgcccaccggcggcgacgtgcaccgcaagaacgagaacctccaccacggcgtgaacgtcaccgacgccttcatgcgggcggtggaggacaacggcccctggcagctggtcgacccgcactccggccgggtgaccgacacgatccaggcccgcagcctgtggatccagatgctccagcagcgcgcccgcctcggcgagccctacctgttcttcatcgacgccgccaaccgcgacctgcacccctccctgcgggccaagggcctccgggtcaaccactcgaacctgtgcaccgagatcaccctgccgaccacgccggaccgcacggccgtctgctgcctgtcctcgaccaacgtggcgaagcgcgacgagtggtgggacgtgcgggagcagttcatcggcgacctggtcaccatgctggacaatgccctggaggtcttcctggagcaggcgccccacggcatgtggcgcgcggtcgcctccgtgttcggcgagcgctccatcggcctcggcaccctcggcttccacacctactgccaggaccagggctgggcgctggactcccacgaggccgcgaccttcaacgtcgtgctgtactccgagctgaaggcccacgccgtggccgcctccatgcgcctggccgccgagcgcggggagcccgaggacctggtcggcacggggatgcgcaacgcccacctcctggcgatcgcgccgaacgccaccagctccatcatctgcggcggcgtcagcccgagcaccgagccgatggtcgccaacgccttctcccagaagacgatggctggcacggggatcatgaagaaccccgcgctgcagcgccgcctcgccgcgctcggccacgacaccgacgacgtctggcgcagcgtcttcctcgagcgcggatcggtgcagcacctgccgttcctgtcggcctcggacaaggctctgttcgtgaccgcctcggagctcgacccgggcgtcctggtcgagctggccgcgcagcgtcagcccttcatctgccaggcccagagcctcaacatcttcctgccggcggacgtcgacacgaggaccatgcaccaggtccacatgcgcgcctggaagctgggcctgaagtccctctactacctgcgctccagctccgtcaaggccacctcggtcggcgtgatgccggagatcctgcgcgagcccgccccggcgccccaggccgaagagacggttgacctgcccgaggtgagcggcgcagcatgcaacctcaacggtgagtgcaccgcgtgtgaaggctgaggaacaacccatgatgatcgacaacagtccgtccctcttctcgaagagagcggagtacaagcccttctggtacccctgggcgtacgaggccttcgtggcctcggagcagatgcactggctggtgcgcgaggtgcccatgacgcaggacgtcaagacctggcgcgccgacctgaccgaccgggagcgccacctgctgacccacatcttccgcttcttcacccaggcggacgtggacgtggcctccggctacatcgaccggtacctgccgacgttcaagcccaccgagatccgcatggcgatggcctcgatcgccgcccgcgagggcgtgcacatccaggcctactccaccctgatcgacgagctgggcatccctgaggtggagtactccgccttcatgggctacaaggagatgctggacaagcacgagtacctgttccagcgccgggacggcctggagggcctggcgctggacatcgcggtcttctcggccttcggggaggggctgcagctcttctccagcttcatcatgctgctcaacttcacccggttcggcaagatgacgggcatgggccaggtggtgagctggtccatccgggacgagaccctgcacgtcgagttcatgatgaaggtgtaccaccagctgctggccgagcatccccacctccgcacggcagagcactccgagcgcatcagggagatcgcccagaagatggtggagctggagttcgccttcatcgacctggcctacgagtccggcgagaaccagggcctctccgccgaggacgtcaagcagtacatccgctacaccgcggaccagcgccttgcccagctcggcgagcgcgccctgttcggcgtcagcaagaaccccctgggctgggtcgacgccatcgtcttcgggaaggagcacaccaacttcttcgagaacagggcgacggactactccaagggcgccgtgacgggcagctgggacgacgccttcggctgaccagcgccccaaactaggaacagcggcatctccagaggaggggcggcggtacactgtgaccgtcgcccctcttttactatccgggcctggcggcacccggtcaggagataccagtgaaccacatgcagcagaccaccgggtccgaggcccggcgcgaccggccctacgagatgggccacgcccgcgtacctaccttcgccaagcgcttcgacgacgtgccccaggcgatgcacgcggccctcgagaaggcccagctgaacgtcgtgccaaacgccttccgggtgaacgtcgggcgcgacctgttcgacctctacctggagcagttcgacccgctggaccgccagtaccacgactgcaactgctgccgctcgttcgtgcaccgctacggcagcctggtcaccctgacctcggacggccggaccaagtcggtcctgtgggatgagaccctgctgggctcccgtcacccctaccgcaaggtcgtcaaggccctgcgcgaggccgtcgagcgcggccacgtggtggaccagttcttctgggacggccgggccgactggggagtccgcgagcagggcggctggtcccacctgtggaccaaccccggcgtgcactcccacacctctggctccaaggacgcctcccaggtggcggccgagcagcgcgagaaccggaagcacctgcacttcgccctccgggagttcaccctgggcgacctggagcgcgcccgggacatgctgatgacgggcggcctcaaccaggccgacaagacggtcaagatggcggagttcctgatcgaggcgaagagggccatggcccacctctccggcgaggccgtcaaccgccgcctgtggttccgcgtcgccatggccggcaaggggtggtgcaccccgcgctcctcgctgctcggtgccctgatcgacgacatccgctccggcgcctccgtcgagtccatccgccgcaaccacaacaagcgcgcggacccgctgacctaccagcgcgcccaggcggcgccgaccgccggcaacgtggcgcaggccgagcgcctgtttgagcgcatggggctcgcccggtcgctcgagcggcgccccgctcgggccgacgaggtcgtgttcgagtggcagccgcagccgcccaagaagaaccaggcgggcggggtgttcggccacctgctgcagcacgagcggctgtccaccgagcgggcgctgctcaacacccgcgccgagcgggtgacctacgccaggttcgccagggacgtcctgccgcgcgccctggagatcgaggtcgtggtgccccaccagggcaacttctgcgcgatcacgactgccgtccaccccgacgcgccgccgatcctgcagtgggactccgtggagtgccgcaacccgttcgcctggtacgtctaccaccagggctcgccggcgtccaactggggcctccgcccgggccgcgccaaggtggtcgggatcacgaagcagccctcccagtggggcggcgggttcgcccaccacggcaactcggtggtgctcatgatcgagggcgcggccgaccagcgccaggcctcgctcgccctgttccccgagtgcctgcgctcggagctgcacgaggtgcgcgccaccctggaggcccactcccgctcggcacgcctggagcgcctgccgcgcggcgtccagcacgcctccggcctgaggctggacgacaagaccccgctggaggtgctggtccgcaccgagggcggcgcggcgaggtacgtcctggaccgcatggactgatggtacgcggttgactggggaggggccatgataggctcctcccctctctattacccaaggagaacaccgatggacttctcaccacccaacttctggctcaccctggcgatcgtgctgttcgccatctcgctcgcctggctggcacggtcgatccggcggcccggcaacatgtaccgcgccggcatcgagtacgcgctggcggagctgcacctggcggaggacgccgaggaggcggccgaccggctgtgggagcggagcgcctccgccttcgaggagcccgagggcgcgctcgagttcgaccgcggcatccgcgagggcatccgcctgtactgcagggcggacgagaccggcatccgcgagctggaggagctgcgctccgagctgacccgcatggtagccgaaggcgatgccagcggctccgaggtcaacgtggccctcgacgtgatcgaccggcgcctcggcgtcggaatgtacctgacccaagcgggcgaggaagccctggagcaagcccgtgaacagtaagcccctctacatcttcgacctggacggcacactggcgaccatcgaccaccgccggcacctcgtcgagtccgaccccaagcagtggcgggagttctacgccgcctgcgaccgcgacaccccgtgccaggcggtcatcaggaccgccaacgccctgcacctggcgggcgccgacgtgtgggtgtggtccggccgctccgacgaggtggcggacaagacctccgcctggctgctgaagcacctgccgtggctgcgggagcacgacccgttcatgggcatggccctgcggatgcggttcgcccacgatcaccagccggacgtgaagctcaagcgcctgtggctctcccagctgcacccggacgaccgtgccaggctcgtggccgtgttcgacgaccggaagtcggtggtggacatgtggcgggccgagggcgtgccctgcttccaggtcgcgccgggggacttctgatgagcttccgacccatgctggcggcgtccatcgacgacgtcctcaagctgcgcttcccgctgcagacctccccgaagctggacggcatccgctgcatcgtgcgggactccgtcgcggtgagccgcagcctcaagcccatccccaaccgccacgtgcaggccgtgctcggccagccgatgtacaacggcctggacggggagctgatcgtcggcgacccggcggacaggatggccttcaacaacacgacccgcggggtcatgtcgatcgccggggagcctgacttccgcttccacgtcttcgacgacgtgacgcaccccgagatgggcttcaacaagcgccacgacgaggccggccggcgcgtgatggcgctcggccggccgtgcgtcatcgtgccgcactgggaggtcaacaccccggaggagctggtgtcggtcgagacgtccgtgcttggcgaggggtacgagggcctcatggcccgggacgcctgctcgccctacaagttcggccgcggcaccctgagggcgcaggacctgctgaagctgaagcgcttcgaggacggcgaggccgagctgctccgcatggaggagctgatgcacaacgccaacgaggccagcacgagtgccctcggcctgacggagcgcggccacagcaaggagaacctcctgggcatgggcaccatgggcgccctcgtcgtgcgggccgtcaatgggccgttcaagggcgttgagttctccatcggcacgggcttcaccgccgaccagcgccaggacctgtggagccgccggcacgacgggctcgtcggccgcctcgtgaagtacaagttcttcccgggcggcagcaaggacgcgccgcgcttccctgtgttcctgggcttcaggagctcggccgacatgtgacgggcggaggctgctggctcacaaccagcagcctcccgggctaccatcgcgagcatcagctcacaactagcccaaggagcccgcgatggccgacggacccaagaagaagcccacggtcgccacgccgtccggggcctacctgcgcatgcagcccctgtggaagatgatcgacgccctcctgggcggcacgaccacgatgcgcgctgccgggaaggagtaccttccccagtacgacaacgagaccaacgcgaactacgagtcccgcctcgagcgggccgtcctgctcaacatgacggagcagaccctggacaccctggccggcaagccgttccgcgagcagatcgtcctgggcgaggacgtcgacgccgacttcgaggagctgtccgaggacatcgacatgcagggcaccaacctgcagtcgttctgccgggcctggttccgcgagggctgggccaagggcttctcccacgtcctggtggaccaccccacccccgaggagaaggtcgacgctgccggcgtggcggtcgcccggaccctggccgatgacagggccgagggcatgcgcccgtactgggtgcacatcaagcccgagtgcctcatcgccgcctacgccatgatggtcaacggcaaggaggtgctgacccacgtccgcatcaaggagaccaccgtcgagcgggtcggctgggaggaggtcgagatcgagcgggtccgcgtcctggagcccggcatctggcaggtatggaagctggtcgacgagaagaaggacgagtgggccatcgagagcgagggcaccacgaccctggacttcatccccctcgtgacgttctacgcaggcaagcgcgtcgggctgatggacgccaagcccccgctgatcgacctggcccacctgaacgtcgagcactggcagtccaagagcgaccagcgcaacgtcctcaccgtgtcgcgcttccccatcctggcggccgcgggcgtgcccgccgagcagaaggtcaccatcggccccaacaacttcctcaccaccgaggacgtgcagggcaagtggtactacgtcgagcacacgggggcggccatcgcggcgggccagaccgacctggaggccctggaggaccagatggccacctacggggccgagtacatgcgcaagcagccgggggacgagacggcgaccgggcgcgccctggactcggccgagagctcgtcctacctggcgtccaccgtgcacgacttccaggactgcgtcgagctggccatgaagtacacggccaactggcttggcaaggacgacggcggctcggtgcaggtcgactccgacgtggacctcggcgaggcggacgccgccgagctggacaccctgaacaaggcccgcgcgcagcgggacatctcccgcaagacctacctgggcgagctccagaagcgcggcatcctggcagacgacttcgacgaggagcaggacgccgagttcctcgaggaggaggccaagaacacgatgggcgacatgttcggcggcggcaacggcacgggcctaccgggccagcagcccccgggcaaccagccgcccggcaaccaggacccggcccaggtcgacccgcccaccccggatgacgagtgatgcccaagaccgctaacgaggagatcctcgacgcgaccgtacgccaccagatcaggctgctgcgcttctcccagggggaggcgcagaagtccgccgagctgctggcccagagcgacgccgagctggtcgccctgctacagtcgggcctcaccgacacctcggaggcccgcatcaggggcctcctgaccgaggtgcgccggatgcgcgccgcggtcgccgagcgcatccaggtggagctcgaggaggacatggagggcctctccaagaccgaggccgagtgggaggtctccatgctccagggggcgacgccgatcgccctctccttcaatgcagtgcccgccacggtcgtcaaggccgtcgcgggctctcccatcaatggcatcccgctgcaggggtggctcgggaagatggcgaccaacgacgtcgcccgcatcgagcagcagatccggctgggcgtcctgcagggcgagaccgtcgaccagatggtgcgccgcatcaggggcaccaaggccggcagctacaaggacggcgtgctggagaccacccgccgggaggcggagatgatcgcccgcacggcgaccaaccacgtctccaccgccgcgcgccaggcgacctgggatgccaacgccgacgtcatcaagggcgtccggtgggtcgccaccctggacggccgcacctcccccgtctgtcagagccgggacggcgaggtctacccgatcgacaagggccctcgcccgcc

SEQ ID NO: 3 - DNA, 43601 bp, unidentified
  source 1..43601: mol_type = unassigned DNA
  misc_feature 1..43601: note = the genomic sequence of a bacteriophage
tcaacaagccgccagtaacatggtgaatcaggagacacaagcatgaccgacaacgccaacccgaccccagccccgtccgctcctgctccggcagcgccgaccccggcaccggctccggtggcacccgccccgactccgacccccgatcccgcacaggtacccactccggcccccgcgccgactccgagtggcgacgataagccgggcgctccgtcggagccgtacaccgctgacctcggctccacccagctgaactacgcggtgaaccacttcgtcaacggcctcggcctgcgcgctgattccccggaagtgcaggagttcctgcgttcgggcaacgacgcgtacctcaagggccacgctgctgccaagggcatcgacgcttccgcactggaaccgttcctgctgatggcgaatgcaggacgcgaggaagtggtgaaagctgccgaagccaaggacgccgcgctgttggcggaagtcgaaggctacgccggtagcaaggaagcatgggcatccatggccgcattcgtgtcgcagcactcgaccccggaacagaaggacgagttcgaccgcatgctggatcagggtggtatccacgcgcaggctgctgttgctctgatccagagccgcatgcaagccgacccccgtgtcagttccgtgggcaaagatgcagcccccggtgcaggcgctgtcgtacccgctgccgtcacccagtacagcacccgtgctgaatggcgtgccgcacagcgtgagctgatttccaagtacggtcagcacaagtacgaatccaccccggaaggtcaggccctgatggccgcctacaatccggcactgcggtaagcaataactgggcctagtgtcaccatgagctaggcccgactcacaacaaccaaggagcaatacatgtcgagcaacatttggggtccgacctctccggtcaaccagaaccagaacctcggtgaaggtccgctgaatgcactccagcaggagaagttcaccggcgaagtcgagcatgccctgatgaacaacaccgtcttcgagccgtacttcaagcgccgctcgctggtgaagggcaccaacaccctgaccaagaaggccatcggtcgtacccgcctgcaaaagctgggtcgcggtcaggctccggacggcacgcaggtgaagttcggtaaggcgtcggtgaccgtggacaccatggtcctgtcgcgccacaccttcgatgaactggaaaccatccagaccgacatcgacgcacgcggcgaagtcgctgcgcaggcgggcaaggacatcggccagttcaacgacctgaccatcatgatcgctgctgccaaggctgcggccatgaccgccaacccgtacggcctcaaggaagctgacggcttcttcggcggtacgcaggtcaccatcgctgcgggcgacgagaaggacccggccaagctgtaccacgccatcggccagatgtcgctgggcatggagcagaagaacgtcaacccgcgtgccgacaaggcactgttggctgtgcgcccggagcagttctacgtcctgatggacgccgagcagatcgtcaacggcgagtacgtcaccgctaccggcaccaagctggattcggtcccgatgttcaagaccttcggcatcccggtcatctcgaccaccaacctgccgaagggcgtcatcgaaggccacctgctgtccaacgaggacaacggcaacttctacgacggcgacttcaccaagctgatcgcgctgctggtcagcgagaaggccatcatcatcggtgagtccaagccgctggaaaccaagatctggttctccgacgagtcgaaggtgtggaccgtggatgcgtggatgtcgtacggcatcggcgtggaccgtccggaatacgctgcccgtctggacatcgcgtaatccaaagtgctgtgacctctgcttgcacgtcacagccgtcttcccaaacaaggagtaacaatggcttcgatcaagagcaagctgccgttcgagcagggcacccatgtgcttctggctgcggctgtcgatgtgttcccggtgaacaccccggcctacgtctgcgactacatctggcatgtggatgcactgcatgtccgtgtgcgcgtggcggatgattcggacctcggttcgttcgacctgctgctgccgctgaccggcatcaaggcgttcgcctaacagactgccctgcccttcggggtggggcattcattggcccaaggagacttcaatgtttatcgacaagctcgccgttgtcaacgcggccctgtccaccatcggtgactctggactgacggacttgcaggaagatcacgcgtaccgcgacttgatcgtgcagttcctcggcgaagtcactgacgagatttgcagcaagggttactggttcaatcaggagtacacgcgactccaccccgatgcgaactccaacttcatctacgttccgaccgacgtgtactccatcgtggtgctgcatactcgcggcttctcggtggcacagctgggtcggcgtatgtacaactccacgcggcagacgtacgagtggacgcacccactggctgttcgactgacccgcaagttcgacttcgatgatctgccgtacgatgcacagcgtgcgatccgcgacgaaaccatcgtgcgattccaaggacgcatcgacgctgaccgcgagacgaaggctgacgtgatgcgagtcgcgcagctgtccaaggaagaactgttgcgcaaggacttgcagcaccagaagcacaacatgctggtacgtcccggcatggaacagaacgcttacgatgccatcggttatggcatgggcgacaactcaccgttccccggaccgaatgttcggatggtgttctaacaggagacaatcatggcgaaggcagtaggcacgatggcttcgatgatccacggcgtgtccgaacaggaaccgcacaatcgtcagcccggcaagatgtgggagagcatcaacatgttcgacagcccgactcgcggtaaggtccgccgtcgcggctccgtctacatgcaccacaaggcgctgccgtctgccgtcgcggaggctgtcagcaccgcacggaacatggaggagtacaccttcttcatcgacggctacgagtacagcctgatctaccgcagcactgcgggtgagggcggcaaggattacttcgcgcagcttgtggcgaaggacaccagcgagttctacgacatcgtgtacgagaacagcacgtgggtggacaacctgatcgctggtggcgtgtccgcaatcgcggcgctgggccggtacgtgtacatcgcaggaaacaccacgatcccgcgtgcgacctcgacggacgtgtgggacactcccgccaactaccagaagctcgcgggctgggtgcgcgagggcgcgtacagccggaagtacacggtgcagctgacgcacgtcaacggtaccaagcaggagtacagctacaccacgaagccctccgcttatccggaactgctggacaccacggacattccgttctggaagcccggaagcaatccgcaggaaccacgccctgactaccagaaggacgtggctgaccgcaccaacgcatacgagggcaagcgctccgcgtggatcaaggaagctgccgaggacatcgttcccgcgaacattgcagccaagctcgccgaggtgatgtccattgcgggcatcgctgccacgagcatgggcggctgtgtgctaattgacgacccggactacaacgacatcaagttgctggacgacggcaacggatcgctggtgtcgtacgcagggaaggaagtgagcgacccgcagttcgtcacgctgtaccactgggccggtaagatcatccgtgtgcgcccgagcggcggtggtgacaaggaatcgtactacctcaaggctgtgccgctggacggcggctcggggtggacaaaggtggagtgggtggaagctgccggtgtcgaacacaagatcgagaacgtggtgtcgcagatggtcatcgaccgtgcaggcaagaccgcgtacgtcgcacagaacggtgagggtttgaagtccctcgctccgcagctgggtgaccatccgatctacaaggagaacgctgtcggtgacggagtgaccgcgccgctgccgtacttcttcggtcgcaagatcagctgccttaccgtgttccaagatcgtctcgtggtgatggcggacaacatggtgaacatgtcccgctcgtcggactacctgaacttcttccggcagaccgtgctgaacattcaggacaacgatcccatcgaggtgttcgcgcatggctcagaaggcgacgtgatcgaacgtgccgtgatgtacgacaagagcctcgtgatgttcgggcgactgcggcagtacgctgtggatggtcgcacgttcttctccccgacgaaccccgcactgaacgtgatcgggaactacgagggcggcaccgctgcgcagcccatcgctaccggtaacttcctgttcttcgggaagaaggcggcagagcgcacgggcctgcaccagatgcgtccgggggacactcccgaaactactgtggtctacgaggtgtcgcaggagttggacacgtggctgaccgggcaaccggtgcagttgatgggaatgacgcagccggacatggttactttccgcacggacgcgtcgccgtcgatttggtacctgtataagtacgcagaccaagacggtgttggccgggtcctgtcaagctggggcaagttcgcctacagcgaggaactcggtaccgttgctggtatcacccatcacgacggcgagatgctgatcgtaacgttgcggagcgcagacggtaaggactactggttcctcgaccggctctcacttgagacgaagctgtcggatcgcccgcaccttgactcgcaggttgactacgacaaggagactgactggcacaaggcacagtccgacaagctgttcgcagcagcgcgtaagccctcggaatacttcctgcttggttcgccacgcgtaggtgcagacgacttcatcgagcaggcacccggcgtcgaatccagtctggttgtgggcagtgtgtctccggcgatgttccagatcacgaacccgtacatgcgggacaatcagggcatgccgatcctcgccgcgaagttgcagctggtttcgtacagcttccatctggcagacactggcgggttccgggcgtacgtcctgcggcccgatccgcagcgtaccatgtggtttgagggtcgggtcatcgggcacacgagcaacgtcatcgggcgtcagcctgtgttcagtggcacgcgatccgtgagcgtaggcaaggagtcccgagcctgcatcgttgaactgcggtcagaggattggcagccgctccgcgtcactggcgctgagtggtcaggtcagtccttcatgccgcgcgcacgagggatgtactaatgagcatcggcacgatcctccaagcccccaacatgcaccgcatcgcggttgcgaactgggagaaggagacaaagactcgtgccgccaacaacttcttgaagaagtcgcagggggacctgaccacgtggtcgcggtccctcggcaacaagaagcgtgtgcaggcggccgaggaggaatacaaccggcagattgaaggactgtcgcacgagttgcggcagatgggtaagcagggaactgcgaactccctgaacgctgcggaacagcagggcgcactgatggccctcgctgcattctccggtgtcggcggcgcgtccgtcgaggcaatggagaaccttgtgtcattgcaggatgcgaccacgcaggaggagttgcagcaggcgatggacaacatgggttacttcggtaaggagaacgccgccaccatcatggggaacgcgtacgactctgccgacctgactcagaccgttctcgatctggacttcaccaagtccgtcaagcccgtggcaatgaagcgccgcttgggcaagctgatcggcgtggccgtggcaacgtacttcggtgggccgcaggctggtgaggccgtggctgacatcgctgtcggtgagtggaaagcaaccaacgcagacttcggcggtgcgatgaactcgtacggctccgcaatccagaacggcatgcaggcgtggaaagacacgtccgaacgtggcggtgcttggggcaaggatgtcatggagggtttgcgtaaggcgaacaccactggcaagacgcagaacgtcaaggtgtcctcggcaagtgagggcaagaagaagtcgtggttcaagcgaaactaacaggagaacaagatggcagcaattcagtttaacccggtggctggtccgcagggcggcgtcggcgcaagcggtgctgcccctcgcgtgggtctgaccggtggtgtcgcaaccgctggtccgactcagaccgcaacctcgttctacacgtcgggcatggacgcgagcttcggaatcaatccggggttcattgatgaaatcctcgcagcaccgttggcagcggcgaagcaggatcgtatctggaagggcttctcggacggcgtggctggtgtcaccgccgagcaggtccagaaggatcagccgtggttcacccgactgttcggcgcgacggactacgagaccggcgttaccatgtacgagaaccagaagaaggtttcggacttggcgatgtcgtggtccgcacgtatgccggaactccgagagttgccgcacgagcaggtcacggagatgctgaccgcagagatgcggggcttgcagacgaacaatccgtttgccgatgcgctgttgcagaaggacatgatgcagacgttcgccccgctgatcgcacagcacggcaaggagcgtactgcatggcagcagtcccagctggtcaagcgtcaggtagcggcagctgagtcccgcaacgcgcagttccaagcactgtccgcgcaggtagcagcactgggcaaggacagcccgatgcaggcggaggcagcagagaacctcaccttcatgcggcagtccctgatggacgtatggactaccggtaacttccagaacgacgaaagccgcaaggcattcctgatgaccgccgcccgctcggctgcacgtcagggtcagttctacgtactggaagcgttgcgtgctgagggcttcatggattccctgtccgcagaagatgccgagcgattcgagaagcagtacgagacggcgcagctgactgcccgtaaccgactggctaccgagaacgaagccttcggcaagatgatcgcacgtgcgaacgcgctgtcgcagatgggcgtcggtggtgagaacatgtaccagatgacgcgggaaatcaacgagacgtaccgggcaatgaccggctcgcccgttggttacttcaatgaccagcagatggcacagatggcaggtaccgccaccgctggtgcactccgccgtcaggagcgtgcagacgacaagcagttccagctgtccctgcgtgcgatggacaagcaggagaaggccgaggccgaggagcgcaacaacgcgcaggctgtgtccgctttcatcaatggccgtgccggtgaggcgctgctgttgaaggacgtgcagcagggtgacgttgatcgtgcgagcatggctcagttcaactccgacatggcagagggcaaggtgggtctggcgattggccgagtggtcaacaacttcgcaaacctcaaggcttcgtacaccaaccagcagcttcgttcgcagttgcagaacaacttgcagaacagcatggacgagaacgtatcggatgcgttcatggcgcagtacggtgtgtggaagcagatgtacgaggcgaaggcgtacgacgccatgggcgaggagactgacaacgcagcaggacgggccacggccatcgggtactacggcgcgaccgtgcaccagaagatgatcgagttcgaccgcaagctgaatctgctgggcgctgagtccgcgtacaagacgaccttcggcgagtgggttggcgcaggccgaccggacttccgtggtatcgagcgcggggatcagaaggtggcgacgaaggcgttcctgtccgcagtggatactcagggcgctgggtggttcgaccgcaccttcggcaacggttacaagctgcacccggctgcacgtcagcagttggccgcagcagtggccccgtactgggagcagctgggcgacgacctcctgccggaacacaaggccaaggccgcgatgcagttgctcctgtcggagaacggtgggcgcgctgaggttgtgggtggtcagttcctgcgctacggtcggcagcagcagccgctgacgaagttcatggatgacccggacggcatgcgtacgaacgtgctgttcgcctccgtgctgcgcgacaaggccaaggccgcaggcttcgatcccgacaaggcgagcatcgccatcgtccgcttgcaggatgacaacggcgtgccgcagttctcggtgcaggcgttcgccgatgaccactacaccaccgtgaccctgaccggcaccgacctgcatgaccttgaagcgaagggcatcaaggaacgtgaccgcatcatgaagcagaccaaggaggaccgcgccgcaggcaagaccggctatggcttcgtgctgccgccggaaaccgatgcgcagtttgagcagtaccacggcatgtcccgtgcagagtttgacgagcgtggccgtcgcaaccgcgagcggatcatgcaggcacttccgtacgtaaccatcccgtccgctgcactgctgcgagacgcaaccaagtaaggagattcacatgaccaacaacaccgacccggtatccatccagaagcgttacgcagaactgggtgagcagtacgggttcaccacgaccagcaccacgcgctccgccgaggagaatgcacgggtcggtggcgttgccaactcccagcatttggagagcatcggcactgcccgcgacttccgcaccaaggacaagaccccggagcagatcgcagagttcgcggaggtcctccgtagtgagggcttccacgttatcaccaaggaccacggcactggcccgcacatccacgtgcaggcgaagactccctcgaccaagaccaaccgcctgatggcgacggaccttggcgatgcctccaacccggtcacgcagaacgagttcgagcgtgcatggcgtggtgagtacgacgtggtggacaacgcctcgctgcgtgccgctgcgcagaagcagtacctgtcggacatcgagaagggcttgggcaaccaagctgcaatcgaaactctgatcggtaccgctggtgaccaagctgcggtgcagaccgcagtgcaggcccgcaagaccttcaatgaggacgccgcacagaacgcagctgctgtattggctgctgctccgtctccgacttccaacactggtaccgacaagatcatcgccaaggaagcacaggcccgtcaggccgctgctatccagcgtgaggaatacgcgcagtccctgacgtggaatgacaagtggggtgcgaacttcacgaacagcctgctcgctggtgccatgcgtgctgcggacaatgaggtgaaggactactaccccgaaggctacagcctgctggagtccagtaaggagtggaaggggtacacgtacaacgagcgtcaacagctgatggagtccgtcagccccgacgacgaggcacgtatcaaggccaacatcgaacagcagcgctacgaccagaagatcatcggcaccctgtctggctccgcacagatcggatggtcgctgggcgcaggcgtgacggacccggtgggttgggccgcaggcttgggcgttggtaagctcgcacagctgggcaaggtcggcgctgccacctatgccgctgctggtcgtcccatcgctgcactggcctcggctgctgctgagggcgctgtcggcaacctgattaccggtgccgcactggacgcgatgggtgactaccgcaccatcggcgactacgttgcagacgcaggctacggcctcgccttcggtggtgtgctgggtggcctacccgcagtgcgcgatgcacgcatggcgaaccttgagcgttcgatccaagccgaggctgcgatccagaacacggacctcgtgatgcgtgcgcaggaactggccggtccgggtgccgacgaggctcagatgaagaaggcgctggacgcggtggttgatgctgatgaacagtcgtggcgtctcgctacgctgggcaacgtgtccaatcaggatcgtctgttcgcacgtcaggacatcggcgtcgaagtgcagcaggttgtggacggagaagtctcgggtgttcccacgcagtccgtgttccggaacgtggaggagcgcaacgctctgatcgagcgcatgaacctgtcgaacctgattgccgacaaggacatggtggacatggtggccgaggtcattggccgctcggagcagatcaacgctcgtatcgacctgtccccggagaagctcaagaccttcctgtccaagttcgatctggaagcgaccagcaccaagctgttgaagtcggagtcgtccgttgctcgtgccgttgcggccatgctgatggagaacccggaaggtgcagccggtcgtcgcagcactgccgccatctcccgctccgctcacttcgagcagtacatgggtaacatcggtcgtgcgactgacgacctgtactccatgtgggcgcgtgagcaaggcgtcggcaccatcggtatccacttccgtgacgagccgcgtgtgcagttcaacaaggccgtgcagttggagatggaccgccgctggaacaagcgaccggaaggtgcggtgcatccgctggtgaagaaggctgcggacatgtacgacgaagggtaccgcatgatggcgaaggatcagaagttcgtcggcgtcatcggcagcgatgctctggacaccacgacctcgggctacttccagcgttcgtggaatctggcgaagctgcgcggtctgactggctccgagcgtacggcgttcctgtcggccattgaggatcagttccgcactgtggccgggttcaccgacagcaaggagttcaacgtcaagtctctggctatccagtacgtcgcacgtctggaacaccgcgccgctggtatgctggatgtcccggcgaacctgtactcgcaggacgctgggctgatcgtccgtgatgcactgcggtcgatgggcttgtccggtgagcaggtggagcagcagatgcagcgcttcacgcgtggcggtgctggtcacaccaaggcacgtatcgacatggactacagcaagcagtacagcgacggtgcgggtaagcacttcacgctggtggacttcctcgacaacgacatgaacggcctgtaccgccgctacgcacagcgcactgctggtgacgtggctctggccaagtacggcatcatgggcgagaacggcctcaaggtgttgcaggaagcaatgctgcgcacgggtgcaacgcagaaggaactcgacgcgttcgctcagttcgctgcggagatgacgggcaagcagttcggtaagggtgatccgctgatcgtgcagaacgcacgtatgctgacgaacctgacccggatgggcggcgcgatcttcccgcagatgggcgcgtacgttgatgccgtggccgggctgggttggagtcgtgcggccaagctgctgggtacgaccaaccagatgcgcaaggaagtgcaggcactggcccgtggtgagaaggtgaacaacccgatcctcggtggcttcgaggggctgggtccggacttcggcatgcaggactaccgagtcttcgggatcttcgatacgtcggacatggtggacatcgcaggcaaggagagcatcggtcgtgtgaccaaggcgatccgtgcgggcgctcacgcacagcgtgtggcttcgggccaccgttgggtgaccgcagcacagacccgtggtgttgctgaccagatcgtccgcaaggcgatgcgctacatccgtgagggtggcgaggacatcgcgctcaaggacatgggcatcgacggtgacatggtgaagcacctcaagcagcgcctgaacaagatcgccacgtttgagccgagcggtgaactcaagggcttcgacccgcgtaagctggacccggacgacatcaatggccgcaaggctgtgatcgagttccgcgatgcagtgatgcgtggtacgaaccagatcatgaacaaggagttcgctggtgaagtcggcaagtgggcgcacaacggttggctcaagatgctgttccagttccgcacgttctccatggttgcacagcagaagtccttcaaccgcatcctgcacacgcagggcgtggcgaagctgacgggcctgctgctgggcggtatggctgtgggtgtgccggtgcacatggctcgcgtttcactgcgtgcttccctcatggaggagtccgcacgggacgagttccttgagaagcagctgcacccgctcgcactgggccgtgccgcgatgaactacctcgctgcgatgggcctgtgggccgacgtggtggagagcgcatcggggctgggtgctggttgggcggacgccatgggcgtggaactgccggatggtttgcagacgaccggtggccgcatgatgaaggatgccaacctgatcggtggtcagttcgctccctcgctgggcgtcatcaatgacatcgggcagggcgtcatgggcaagccggacaagctgtggaagaccgcaccgttcgcctcgctgccgtacatccagcctgtgctgatgggcatcgagtccgagttctcggaggattgacaagaggggaccttcgggtccccgagttttggtacccgtataacaagaggagaagccatgaccggtatcagtgacccggccttccggtttgctaccaacgtgttcgacacggatggcaccgataaggtttacaacatctccttcgaccttggctacctcgacgaagattacgtcgttgctatgtcaggcgttgaagatcccgacaccaagctgatcggggacaccaccgcgcacgttgtcgagttcatcgatgaccctgccggtaaccgcatcaaggtcagtcccgtgcccgtagctgggcgcaagctgatcgtgttccgacagaccgacatcagcaagctgctggtgaagttcactgacggtaagctccagactggtcgcaacctcgacctgaactccatgcagcttatcatggcgatccaagagattctggatggcctgcggaacaacaacctgatcgtgaaccagcagatcggtacggtcgttgagcttaacaagatcgtcaccgagatttacaagcaggtgctggaactgctcgcctctggcggcatcgtctccgtagctccgcgcgtgtggtccggtggctggaacgctgccgacgacaccgttggtgacacggacttcgagattcccggcgcagacgtggacggtgcgggcttctatgacacctacgtcaacggcgtgggcttggagccggatcgtgactacgagattatccttgagggcgacgtgccttcgatccgattctcccgtgattaccctgaaggttccacgtggttcacggttctccgtggatacgcgaagccgtacaccgggccgcagcctgtcaccacgttggcatacccggtcatccgctcggatgccaccgcgtacttcgtggacaaggccgctgccttcggcgtcgttcttctcaccgcagccgatgcggtcaacgccacggtcaagctgatcccggaaactccgggtagtaagatcgagacgggtacgttcatcacgctggttcagcgcggtgggcaggtaaccctcaaggcagaccccggcgtcaacctgatcgtacccggcggtaccgtcgcacgtactcgcgcactgaactcggccatgtctctgacgtgtctggatgctgacgcgaacgagtggctggtgtcgggcgatcttgccaagcaggagtaaccatgcactttcgtctgttcgaccgaccgctgatcgttgacgatccgctgtctcgtatgtacatcgacgggcagtacgaagactacgaacccggctctgcttatgagggccgggtacagatccacgggtcggttggtaaatgcaaggtggaaatccttgagggtaacatcccgcccggttcgtacgcctacgttgacaacgtaaccaaggaggtcgtagtcaagtggccgaagtatacgccacctgttgagacgttcacactgctggagaacggagacttctccgaaggagacaacggggcttggaccaacaccggcgaaggcaatcccttcgtcattgaaccggactcggacgggcagatgtccatgaagttcaagtctggtttcggtgggggccactactccgagtccatcctcgccccggtaaaggaactcaaccggcagatcacggccactggccgcatcgcgcagggtaagagttccaagcgcaagctgtggggcggtatcgttctggtcttccatgacgagaaccggcagtacctgaaccatcttgagagcaactgggttaactccggtggcggatacaaggatgtcacggtgaccgctgctcccaccgatgcccgcaccaagtatgtcagcgttcggattcacttcgaccgcaagggtcagaaccatccgggctgggccgacgacatcaagtggaaccacgtgtgggagaaggggtacgacgatgacggcacgcactacgttgtggtgcgcgttacggactccctgaacaacacggccacgcatcgcggcaacatcgagattactggctcgtacatgatttcccagctgtacccggtgtccgtcacggacagcctgcttgcaggtcttccgtctgacgtgcgtacctcgggcaagagtggcagcatgattgacttcgttggagcacagatgccgatgatcgccagtgtcgaagccaagtcttcgatcaagcgtgcgggtccgttcatcgaacaggtcaacgcgcagcttccgcagcttgcgagcgtcgtataccagtcaatggttaagcgcgtcaccgccccagcagagcaagtatcggccagtgcgcctacggtcgccagtgttacctacaagctgtccgtcaagcgggccggtaactacaccgacagtacgcgtgcaacgcttcccaccatcacaggagtaactgttacgtgaagctgaacttccaagtcgaggggctgttccagcccttcgccgtccgcaaggacgagaacggcgttgagatttctcgccgagcgcttgcaccggagcagcgcaacctcattaccaacgcgggtctggactacctcaactccggcaccatgcagtggtactacctgcacatcggtacaggcactgccgagccgcagaacacggacacccgactgaccacgtggcttgcatacacgggcgagaactaccagtcggctaccgagtccggctccactgtgttggagatgcagacggcggacgttgtgtggggtggtcgcacgcagtacatgtcgttcccaccgggtacggctgttggcaacatcaccgaactgggtctgtctgtcagtaccggccccaccgccgacatcctgacgcacgcccttatcaaggacgagagcggggatccgaccgccatcaccgtggagccgggcgagtacctgtacgttgcgtataccctccgcgtataccttgttgccaaggagtccgaggtcggtaccttcgagattaacggggagaccatccgctatcgcgtgggcctgtaccgttgcactgatccgggatcatccctgattgccaaccacatgccacagggcgcgggtccgcgttcctccaactatgcacagcgtagcggggtgcggcacgcaagctccccgtggcccactgatcctgccgacgcccgtaagggcgacgcgggtgttggcacgaacggcgttgcaagctactcgtacacgccgggatcatacacgctgcggtccacctatgtgtggtccccgacgagcggtaacggcccgtggtatggtatcaagctggacctcagctggatgaactaccgcatccagttcctcgacagcttcacgaagacctcggactacaccctgacgttcaacatcgaacagtcgtgggggcgatacacgccgtgatccctcaactcattccgactgcaaagccgggtgagtaccttctgccgcctcggcgccggagccttccctttgtggattgggccttcggcaccacggcggtggaggggacgggcactgtacgtgaccagcgttggactagcgagaaggttggcgacgactacttcatcttcattgagggtagctctgcgcgaaccaaggttctctccaagcccggcgtcacccgattctccttcgacttcgaccagctgatgcgccctgttgttggctacagtatcggaccggactccttcgtggatgttcccacgccgactggcatcaaccacaaggagtaccccggctgccgtgacatctgcgtcaacttcgatgacagccgcacggtatccaacagtatctcggacgtgcttatcacgatgatccgtggcgctgacatcatctgctacgtgcagcgtgagggctacaacgtcgagcatcgactcgccacgggcgcaaccgcccagcatcgtatctacaactccggcctgacccgtgccaaccgcttccagtggaaggtcacgccgcaactctaggagctacaatgaaactacccgtcagcgtggaactcgctgctgcgaccccgttgacgggtgtcggtatactcgcgtggctcaacgcgtactcgtccctcgtaatggttggccttggcctgatcggcttgggcttccaagtctggtggcgacgccgcgaacacaaggccatcatggctgcaatcaaggagaacccgtatggctaccaagaacgccgccgctgagtccgctctcggcgaactgcatacgctgcttgcgaccgtgatgtccgcgcagctgcgcaacgcagacctgtgcaccccggctctcatgagtgcggtgcgtgccttcctcaaggacaacgagattacctgcgctgctgatgcgtccaacgcactgggcaagctcaaggagaacctcgctgctgctgaggctcccggtcgtgcaccggttccgtccgtcaccgataaggataacgacgacgcactgaacgaagtcctgaacttcgcggagtacaagaaccgtgtcggctaaccagatcgatgacctgtcgtggcgtgagtcccaactccgccacttgcaggagcactacgcctcattcaacgtcttcctccgcgatgccatgtggttcctcggagagtggactccctcgtggatgcagtacgacatcggtacgtacctgcaacacggcccacaggacctgatgatccaagcccagcgaggcgaggccaagtccaccatcacatgtatcttcgcagtatggcagctgatccacgatccgaagcaccgagtcttcatcgtgtccgctggtgagaagatggctacgcagaacgcagcgcttatcaccaagatgatcctgttctgggacattctggaatgcctgcggcctgacaagagtgcgggcgaccgtacctccgtcgaggcgttcgacgtgcatcactccctcaagggcgtggacaagtccccgagcatcgcgtgcgtcggtatcacggcgaacctgccgggtaaccgtgcggaccttctgatcgcggacgacatcgaatccccgaagaactccatgacgcagggcaaccgcgacatcctgatgaccctgagccttgagttctcggctatcgccacgggtcgtccgggttggcccccgcgcatcgtgtacctcggtacgccgcagacctcggagtccatctacaacaccctgcctgaccgtggcttcgcgctgcgcatctggccgggccgcttcccgacgcatgctgagatgtcgaactacggcgagtaccttgcgccgaagctcaagaacatgatcgaggcacaccccaagctccagtttggtggtggtcctgcgggcgacgctggtcagcccaccgatccggccatgatgaacgagcagaccctacagcgtaagctcatggatcgcgggcagagtagcttccagctgaactacatgctgaacactcgcctcatggatgctctgcggtatccgctcaagtccgagcagctgatcctgatgccgggttccccgactggcaaggtgcctatggtcatcaaccgtggcgtaggcgcagccaatcagaagctcgtgcagtccagcggtgttgctcacatggtttcgcaggcgatcatcgctaacgacgtggagtggattccgtgggaaggcgtgcacatgcagatcgacccggcaggtggcggcgacaacggagacgaaaccggcttcgctgtgtccgcatacgccaacggtaccatctacatccttgcgatgggtggcattccgggtggctatgccgatgcgcagatggagattctggccaagatcgcggagcgattcaagccgcacaccatcagcatcgagaagaactacggctatggcgcgttcgccaaggtgtggttgcccatcctgcacaagcactggaagggtacgatccttgagccgtacgtcggcgggcagaaagagaagcgcatcatcggcactctggagcctgtgatcggtcgcggtgccctcgtggtctacgaatccgccatcgacatggacgacgacatgaccgccatgtacgcaggctcggcaggtggccgtaaggtgtactccgcgctgcatcagctggtcaagttgcagaacatcaagcgctgtctgcgccatgatgaccgactggacgcactggaaggtacggtgtcgcactgggtatccaagctcaacatggaccagcagcgccgccagatcgccaacgaagccaaggcgtacgagaagtggctcgctgacccggtgggttggtcgaagtccggtagtaaccactacgttcagccctcgcggccgaactccctttccaagtacatggagtaattcgcatgatccgttctgatttcagcaactacacgcccgtctacggcggcggtgccggtctggtgcaggagttcgtcaagctcgtgggctacctgcgcaccttcccgaacagcgccgaagatgtcctcgccctgttcaacgccgacgtggcgaaggtgcaggcatcactcacatagcgctgatcccggacccggaagaacccaacgccccggaggagtaatacatgaatcgactgttcgatctggcagtcgatcccaccgatctggccatgtccctgctaaaggcggggactcaggctgagatgcaggaggtgatcggcaccggaggtggctcggctgtgcctgactgggcacccatcaccgagttcttcaatggattcaacaacattgacgagggctttggccgcttggagtaccgcatcatcgacggtgtggtgcacctgcgtgggtccatcaggtccgaatcgcatccttcgtcagctgagatgttcgccctgcccgaagcccttcgaccgagcgtgactcgtgtggtactggctggtggtgggtggcccggcagcggtgagttcagcgcaggtcggttcgacatcggacctaccacatctcgcgtaaagatcacccagcccgcctcggcaacccgcacttactacctcagctttgacggtgtaagctactcactgtaggaggaaccatgaccatcaagcagcggctactggcaatcttcgccggtagtctgctgtctgttgcaggcatcactcacatagcgctgagtgagggcaagcaccggacagcctaccccgatccgggtacgaacggcgcaccgtggaccatctgttacgggcacaccggtcccgaagtgtaccccggcctgaccgtttccgaggagcagtgccagaagtggcttgctgatgacctcgccaagcacgagaagttcgtccagaagctggtcaaggtcccgctcaagcagggtgagtacgatgccctcgtgtcgttctcgttcaaccttggccccggcaacctccagagcagcaccttgctgcgcaagcttaactctggcgaccgccggggcagctgcaaccagtacccgtactggaagtacgccaacaagcgtgtactggaaggactcgtaactcgccgattcaaagagcagaccatgtgtttgcaggagggaccgtatgtattccgtccgtgacggggtactctcggtgctgttggtggtggttctcctgttgggagccaccgcttacttccagcacgagcgtatccagtacctcagcgctcaggcagagacagcctcagcgaccatcgccgcactcgacgcaaaggtcaagggtgaggcccggctccagaaggagcgcaaggagaagaatgatgcagcacaagaagcttaccgtgcgaaccctgtgtggtctgctgatgttgttcccgatgatgttgctgacctcctgcgggatcggcatacccggtgaactcctcaaggactgcgcggtaccgtacctcaaggatggtcctgttgtcaaccaagacatcatcgacctcgctatcgagagggagttcgcattgaagtcctgtaacgtggacaagaaggcactccgagagtttgtcaagaagcatccgaagctgcgcgagaagtgaatagcagaaggcaaaccgaaaaattgatggctccacgcgaggggtcacctcagatcgcaggctcctcgcactcccccatacgcccacccgcgcgcgcacacgcgttctctcccagatccatacacacacctgcacacgggcacgcggaggcgcacacacgcacgcacacgcaggctcacgcgcatcacacgcgcacgattacgcgcacacgcgttctatcccacggtactttcctgaatggttcatgaataaatcctccaccatacgccaaagtagttgcaccgtatggatgatctggtgataatgggaaccactggaggcgcggaccacaacggaccacaccgacaggggttgacaggacaggatcacatgatccatactgtgaacacgctgcaacggcgagacctgagggacggcgagacctgagggacggaacacggtcctgtagacggctcggttagtggattctttcccttcaatgggtgatgacacagcagctaccgcttgacacgcttgtgcggcatctgtatcatttgctcaacggtaacggcttcgcagttacctagcaacacgttgtaaacaccgttacacattggatggaatcggtggctagagttttggtacccgtataacacagagaaacttgcgatgcgaagtcccttgactactaggggatggatggttagacactcaccggtaaggcccggtcattctaacggcggagctatgcctataaggcaagagtgaatactgtgggtcgctagtaggcatcagcttatctgcttcacccgtaagtctaccgaaaggttcaccgtagggattgacagacagctagacagatgccatactgacagggcgacagagtgatccgacaggttgatgacagatgacctagacagaacacttgacagacggaccacggtgtgagacactaagcaccgagtagtaagcaacactgagcaggcatcacaggatgcttgacaggaccggacagatagcttacagtatgactacctcagcgaccacacagtgagacgcactgaggcatgagtacgaaagggttgacatagacctgcgggtcaggcacaatggatgccagtaagaagtccaacgatacggacgggaaggccactaacctaacatggtgagtgagtagtaccaagtgatcggaatgctggggtgttagactcctaagctgggccggtgcggcgttaactcaccggagtctagatggcaagcagtagacgtgtgcgttaccacgttgggctgcgaaccatactaggttaaggaggtgccgactaagggcatcggtagagcttacggcagacataccgtaagccgggacgaatactcccgccgttgcgtgataaccggaaccgacgaatcttgtaggtcatacgtgatctatattgttggcttatgcaacatgttcccttgtgactaagggtgcatgcctcataacctaacaggatgattcatcatggcacgacgtttgttctctcggttcgtccgctcgtataccacgctggacctgcgtactgctgaggagactcggcttgcacgctgcaccaagtacgaacgtaagtacaagaccgctggtaagaaggcggtgttcgcatgagccgtcactttgtcaaggccacggtgcgtgttgctggtgtcaagaaggcagcattcatcgtcggtgactggagcagctacgaggacaccgtagctcacatgagaaccgagcagatggatcgcatcctcgacgtgttgatgaccacggtggctgcgatgcagtgcgtgccggtggataccgtgtccgctgaccgtgacattgtgtatgctgacagtgcggagcgtgtgctgtgatccggctgcacttcattgacagggacgctgcgtgggctgcgtgggacaagcacggtggcgccacaatcatgtatgtgaaccgcactggctggtggttttgggtgaggctcgcatgatgggcagtcaaggtccgtattgtccgtactgcttctgcctgctcacatactacggtgtgtgcctccgctgtaagggttgaatgccgctgtgccttcgctgagggtacagccacatgcaatccgcatgactaacgagagacaatgatgaacctgaacatcatcaccgacaacgccgtgctgaacgccaacatcaagaagatcgacaagcagcggcagtccctgcatgacctgatccaagccaccggtatgggtgcgctgtggcaggcgctcaagcacaagaacatcaacaccgcgaacatgctggtgcaggctgtcggcaagggcatgaagcagcaggctctggtgctgtggctgtgcgagttcggtccgatgaacccggcaggcgagaagcagcagaaggatgggacgttcctcctgttcgacaagaccaagatgcccgccgatgaaaccgagatgaacgctcggctgatgggtgctgctgcgaaggagtggtccgccgagaacaccgagaagaatgcggctgcgttctacctcgccaatggcatccatgccctgatttcccagttcgagaaggccgagcagggcaagggcaccaagcagtacgtcgccaatgacatggatgccgaagtcatcaagcagctgcgtgccatcgccgagcgcatgcccaagcgtgacttcaaggccgaggccgcgaacgttggcggctgacttactgatcggggcaggctgcgtgcttgccctgatcctgttgatccaccacttactaggcaaggagttccaacatggcaaagaagagtgacagcaagccgcgtatcgtgaagtacatgcgtgacggttcggtgcgtgtgctgagtacgggtcagtacgctgaccgcaagcgcaccggcaagaccaagcgcaagcgtacccggcaggtggctgcgtaatgcctaccgtcatccgcaagaccgcacccgtgtactgcatcgacggcctgaccgaggagcagcttgtccatctgcgtgaggcagtgggtgattatcccggtaatggtgagggcggcgctctctacaagatgctgcaagatgcaacggcgcacctcgaatgagtgctccggctccgcatcccgcaagcgagtccatcaccttcgacaaggccgaggccgcagtgctgcgtgaagcattgcagttctgcgcagagttcgacaacctgaactccgacgagcaggccatcttcgacaagctcgacgcttacttctcctgatcctgcatgccgctgcgccttggtaacagggcgtagcggcatgcaatgtcgcatgaccaacgagagacacaatcatggcacgttccttcaacaccaccgtcaagtacaagcgcaaccgcgaaaccatcgtggtcgatgctcgtaaggcagtgcgtcgggaccgcaccaagatcatcaccactgaggtgaacgagtaccacgagagcgtgagcaacagcgagcgccgggactacttctatggccgggcgtaaggtacggctgaagtggaacgccgcatggcaagcgtgggtgtatcgcccgctgcacatcctgccaccggcgtacgtcatcgcattcatgtcggacctgaaccgactcaacagtgaggtgacccgtgaaggtaggtgacaaggtagtctgcactggctccaacgggtacgccttcaccactgggcaggagtacaccatcatcgagtaccagccaccgtaccgtgacccgaccagcgctgccggatacacatggcctgcgtatgtcgtggtgatggatgacgatggcaggctcgcccactgtcacgccaaccgattcaaggagaaggcatgaaagagtacgactacgcacaccagaccaaccgacccgtgccgcttgaggtgagtgaaaaggacgtggctcgccgcgttgtcctcgtcaccggcgacggcaagcccactggtgcactgatcctgcaccgagcaatcaagaaggcaagcaatgcacccactcgcacacctcgcagctgactacggtgtcacgctggaacagatggccgtggctctggcctgcgaagcacagcacgtaggcaaccacgctcccgctggtaagatgcagcgggctgtcgaactgcgtaaggtagtcgagcgcatggacgtggcgacgggtgagatgcacacgttcgtccacatgcccggcttcggcagaccttgcaaggtcaacagcaagaccacctacatgggagacggttggatgttccgttcccgcatcgttgacaacatcctcaaccactggtcatccgaccgctacgtgttcaccctcaccgagaaggagtacccgagctatgagtaagtccgccaatcgtacccgcctgtacctgttcgcctacttccatgcaggcaccggcaagttccacgacatgctgtggcacagcacggtcgagagacacctcgatgtcgagagcaacaagctgatcgagaaggtgtccgccgtcgagcagtacgagaacctgctcgctgccatccccgagtccaagcgtgcggcctgcggtggtggtacccgcaacctgcgtgccaacgccgaggaacaccgtgtgtacggtggcgtgtcccgccgtgctgtggcccgccgcatccgcgacagcttgcaggcaagcatcggttcgtactggagcatccgcatcatcgaggtcggtgacttcggacgcgagactcgcccggtcaagcactggaacatcgaacgcaagcgccgactgcgcggtacccgtgaggcgtggatcgctgacaccgcaccgtacctgcgtggctacgaggtgcgcgagacggcacgtgctgatgcgaaggcacagcaggacagctggaatgcctccggctccgaccgctacgagtaccgcttcactgccgtgccggtgtacgcatgagcctctggtcccgagtgaaggcagcgttcacccgcaaggaacctgcacccgcacccatcactgaggtgggcaagccgtccgaagtgactgcgatccagacgttcgctcgccgtgatggccgcgttgtcctgagcaagcagttgctggtcgtaccggacccgccgtaccgtcgcagcaccaccgcactgcgtcgcttccgacgtgacgctgaccgcaagtacctgcacgtcagcgtgccgatgacccggcagatcgtggacctcgttgccatcttcggcgagcgctggttccgcaaggtgcacaagggcaagggcatcacctaccgcaaggagaagaactgatggcacgtgacgtgtcgaacttcatcaagatcaccgtaccgatcctgctgctgcgcaagcacgctgacctgcgcgacgagttgcaggctgctgcactcgctgccggtggtgccacgagccacgaggccaatggcatctggttcgatgctcgtggtgttgcccacgaggagcgcgtgtacgtcttcacgtacaacttcaccgacgaggcgaatggcatctggttcgatgctcgtggtgttgcccacgaggagcgcgtgtacgtcttcacgtacaacttcaccgacgaggcgagcgtgcgggttgaccgtgcgacccgccgtgtggtggacgcgatgttcctgctgggtgagcaggcggtgatgaaggaacggaactacaccgagcgcaccgctcgcatcctcgcatccgacaccgggtacaaggcccgcatcatccacgctccgccgcacctgaatcagcagcgtgcactcaagctgcccgatgtcatcgccgatgaccagagcatgcgtaccatccagatgcgcgacccgacgagccggggctccgcactgcacgacagcaaccacatcaactagcacctaggaagcgcatgtactacaacgcaagagacggcccggtgtactgacacacagaggacactgagacgaagcgccgcagcgcccgactgcatgaacaacgggcaccttcaacgcagagcatgcctgcatccgcatgtactttctaggagaatcacaccatgtcgaacgccaccatccgcaccgccgccgccatcgctgccgaaatcgctgccatcaacgccgccgccgaagccaaccagaccgtcgccgacggtggtctgctgaccgtgctgacgctggaagagcgtgcggccaaggccgtcgagaagttcgagaaggccaaggctgcgtacgatgcgcaggccgcagtgcgtggcatcgaagtcggcgctgccgtcaccgtcgccttcggtcgtgcccacaacaagcaggtcctgaccggctcggtgctgaacgtcgagcaggaagccaccggcctgagcttcaccgtgctgaccggcgcgggcaagaccagccgcgtcatcaacgtgagcgccgacgccgtgctgctgaccgccgacgacgtggcccgcgtcgaactggaaatcgaagccgccgtcgccgagaaggccaaggccgaagccgccgtcgccgagaaggccaaggccgacgccgccaagggtgaaggcaagggtgaaggttccgccgagtaatcggacgggctgagtagtagcggtgtcctctcgcaagagagggcactgcgatgcacactgtaagtcgtagctgtctggcaaatccgggcacgctagtgtgcatcgcagtgcgactcccgcacttaacaggagatacaacaatgatcctcgtgacttaccgcatccgcatcatcaactccaacggcagcgtcaccgatggtggcagcaccacgttcctcgacagcgtgagcgtcaagcaggcaaccaagtcggtggccgagggactccagcgtgctgagtccaacgtcatcctgaccgaaagccaccgcgagtccgtctgatggatgcggccaagctgatcggtgatgtcggctccgtgctgatcgtcgtcatggtggcgctgatgatctggatgaacttccaagtcggcaagcactgggccgagcgtgtgaagcagcgccgcagcctgagctacctgaactacccacgagtgggtggcctgcgtgagtacctgacccgcccggcagcgatgctgaacggcgtgttcggtgagcaggtcaagcgggagatgacacccatctggttcttctaccagttcggtggcttcctgatcctcgtgaacctgctgtacctcagctggtacaagatcggcacgtacttctgatggtgtacgccttcctgtatgtggacaaggatggcgtgaagtccgagcgacacgtcaacgttgacacaatagggagggatcatgtgactgggtactgccgactgcgaagatgtcggcgtaccttccgcaaggatcgcatcgttcgcagcgagatggtcgttgttgagacgggcgagatagtagacgtgatgacaggagaagtgagatgacatcccgcatgcccgacgacgagtggttgccgcaggcgttgcgcctgttgactggcggccgcaagtcagggcgcggcgatcacatctgcggcgagccggggtcactcatgctgacgcgtgagggctccggcatgtccgcgtactgtttcaggtgcggtggcactgggcaccatagggagcgagagactcccgctgaacggttcgctcgtatgcaagccgacgctgaggcgacagcctttgtgcgtgcgtcggtgtcaccgcccaaacccaccagctatgacccggccaagtggccgaaggaattggctgagtggttctacatgataggcatccatcacccacgcatgaaagaactcggcctgtactacagcgcggaagcgcgtcgagttatcctgccgatcaagcaggatggtgaggttgtcttttggatgggtcgctcgcagaagatgaagcccaagtggctcggccctgacgtgaagaagcgcggactctttgccaagtacggcgagggtactggcgctttcgtttgcttgacagaggatgcgctgtcggcatacaagatcggcatggtgtgcgaggcgtggtcacttctcggcactaagctgcacgctcggcatgcgatccagctggtagagttgggcaagccggtggtcgtgtggttggatgacgaccacgaccattactctggcgtgaaccaaggacaagtagcggcgaaggaaatcatccgtaagctccgctcgtatgggttggtggtgtacaacatgaccagccccgaagacccgaagaagtacagccggtatcaactcaaggagaaactggaatgtttggcaagctctattggaagcacaagtgcggcatcctccagcaagcactgaacaagatcatggccgacacctcgctggtgtccttgcaggaataccacaagcttcgcgttgcgttgcaggctgcggagtacaaagtggcccggctggaacgtgaggcgcgcaagcaggtggcggtcagcagcacctcattcgctgacgcgtacatcccgaagcgtgcgctgaccgtaggtggttgggcaggtgcttgcttcgacttcctgctgcgccacccggtaaccgaggcagagaagatggaccgcgccgcgattgcgtacggtgggtacaacgtgacgacggagtacggtcgtgcactgatcggactcaagcgcatccacaagagtggtgcagaccagccgcagaccgagccgctgtatcgactggccgaggacatgggcgacaagtgggtgtacgtctacaagttaggcgagacgcaccacgtcgcacggttcccgaaggacatccgtggactgcctgctgctcgacagtacgtgacgttcatgaatagcttggaggcgtaatggatcacagcgtgaacaccctgcttcggctgggcatgcgcaagcgcacacacgcgaagctgttcgacatcatcccgaaggctgtgctggaagggaacgtgctcaccttgtgggaagcacaggcgaagttctaccgccagttccccgaggctgacggcatcactgatgtcggcgcgtggcgtacgtggcttgcggatggtccgcttgcgaagcacgacgaggacagcaaggaactcctgctgttgctcgccaacaaactcgggcacccgattgacgaggcgatggtgcctgccctcaccaacaactacctgcaacaggcgctatcactggacgtgatggatgccatcgagaagtggcaggacccggacaacgaggacgacctcgacacgctggtggttgctgcgacggacaagttcaaggacttgctcgaacgcacggtgaagtctcccattgaagacagttcgattgacgatctgtatgcaatcgaggagaacaacaccgggttcaagtggcgactgccggacttgcagacgagcatgcgaccgctgcgtccgacggactcgatcatctgggccgcacgccctgaccgtggcaagaccacgacggtggcgagcgaggtcagcttcatgatcccgcagatggacgaggtgtatccgggacagaacaagtccttcatctggttcaacaacgagggtgactccaagagcatccgccgccgtctgtatcaggcagcgctgggtgtcaagggttcgcagatgttggagtggcaccgtgacggctcgcttatcaagcgactgcatgaggcgttcggaggtgaggacatcttcaagcgcatcatgattatgagcatccacgggtacagttcgacgcaggtgctgcgccttatcaaggagcacaaccccggcctgatcgtgttcgacatggtggacaacatccgattcaccggtgcgtcaaccaacggcggcacacgcactgaccagatgcttgaggagatgtatcgctgggtccgtgaccacgcgaacatcgatcagtacgctgcgatcagcacgagccagatcagtggcgacggcgagggtatgcagttcccgctgatgtccatgctcaaggacagcaagaccggcaagcagggtgcgtgcgacgccatcgtgatgtggggtgagaagcccggcaacgagcgtggccgttacctcggcatcccgaagaacaaactgaccatcgaaggtcagcccatgaacccgaaggttgaatgctacttcgcgccggagattgcgcgcatcatgtcgatggacgaagcagcggaggagtgacatgtactacgacagcatgaagccgcacatcctcaaggtcgatggcgtgtgggctgcgttgatgtatcatccacgacggagcagtcgcacacacgagacgtacccatgggcgcaggcccggcagtggtgcaggatcaagaacgggagttaatatgagcatcgtcatcaagcccatgcaggagcgtgggttcctcgcgtgggacttggagacggggatcaagcaggcgctgcggcgcaaggcttccccgttctacggtctcaatcaatactgggcggttggcttcggcactggcgtgatggaccgggtgggtttccaccgtggtgtgcacggcatcccggacaactggttccctgagatgctcgaccagtgcaagctgctggtcgggttcaacatcaagttcgatctgctgtacgcactgcaatgcccggtgaaccacaaggcgtggcgcaagtgggtggccggtggcgggcaggtgtgggactgccagatggctgagtacctgctgcaaggcatggacaagccgtggcagatgtgcagcatggacgagacggctccgctgtacggcggcagcatgaaggacagcgcggtcaaggcgtgttggcagaacggcatcgacacaccggacattgatccggacatgttgatggactacctgctgggtaccggcgaggacaacctcggcgacatcggcaacaccgcgcacatcttcaagggccagttcaagttggcgaccgagcgcgggcagttgaagagcatcatgctcaacaacggcgcgctgctgtacacggtggaagctgaactcaacggcatgaagattgcccgtgagcttggcgagaagctgcgcgttgagttggtcgagaagctggaggtggtgagcgcgaaggtcaatgcgtacatcccgaaggacctgccgttcgatttcaactggggcagcacggcgcagaagtctgcgttgttcttcggcggcagcgtgcgttacgatcagcgcgtacacaagtgcgagatgcacgaggtattgcaggacgaaatcaaacggggcgctgccgaggaccacggtcaggtcggggcgcacgagtgcacggactcctgccgtaagttgtatgcgaaacgtgaccagctggagtacgttctcaaggccggaggcaccaagcccgagtcagaaatgacggagaaggactgggctctcgttgaacgcttcgccggtggtgcgaagaaggggatgccgaagaccaagaaggtcaaggttgacgacttggacaagccgaagatgttcactgtcgatcggttctacaagttccccggcttcgtgacaccgctgccgaagtgggagagcaagtccaaccccggccagtacagcacgagcagcgatacgattgacgaactggcaacgtgggttgacgcgccgccgttcatcaaggacttcaccgagcagagcaagatcagcaaggacttgtccacgtactactgggtgatcgacagcaagaccggcgagcgtaagggaatgctgtccttgcttggcccggacgacatcatccatcactcgctgaacatggtgaacaccaacaccgcgcgcttgtcgtcgtccgatccgaacttgcagaacatcccgaagggtgacaagtccgatgtcaagacggtgttcatctcgcgcttcgagggtgggtacatcatccagtcggacttcactgcgctggaagtgtatgtgcaagggaacctgtcgctcgacaagaacctgctgtccgacttgcgcagtggcatggacatgcactgcaagcgagtgagccagaaggagggcgtgccgtatgagtacgtggtcgagcgcgccaagaacaagaagcacccggagtacgaggtctggtcctacaagcgcacgaaggcaaaggagttctccttccagcgagcgtacggtgccggggctgcggccattgctgcggcgactggcatgtctgttgaagatgtgaaggctttgatcgaggccgaggaggcgatgtaccccggcgtcatcaagttcaacaacgccacgatgaagcagctggaacggaaccgcaagccgagcaagctgttcctcccgcatgacatcactggcgacccggtgaacttcggcaagtcttggttcaagactcccgatggtaagcggtacacggtgtgggaatcctgcgcaccgaagtggctgtacgaacgagacggcacgctgacctcgttcaagccgaccgtcgtccagaactatccggtacagggtaccggtggtgagtgggcgaaggcagccatgtggttgttgatccgtgcgttctacgagatggacaacttcgatggcaaggcgttgctcgtcaatcaggtgcacgatgccgtgtacgttgacgcacaccctgacgtgtacatcaaggccatggccctgacgcatgcgtgcatggaggaagcaagcgtgctgatggagcagcactttgattggcccatcgctgtgcctgtcccgacggagacagtgtacggttccagcatggcggaagaactgggtgcacccgaggagatgcacaagtacgttccgctgtaccgcaaggtcatccgtcagaagtacctcaagaatcacaccgcatctttcgagaaggagtaacacatgtccctgatgaacgccgcaatgaaagccaagctcgccgccgccaagaaggtgggcccgaacatgaacgaggcgactgccggtggtggttacaccgtgacgccggaaggtaagaacgcacgtctgcgtctggtgggctactacgaagtgggcaagcacaccgtgcagaaaggcccgtacgcaggcaagaaggttgacgaggtgcgcctcgtgtgggaactgtcgggcaacaagtgggagccgcaggagttcgacggcaagaaggtgccgtaccgcatcacggacaccatgacctacagcctgtcggagaaggcgaacttcttcaagctgttcaagcgcatgaacgagtgccacggtggcgaagcaaccatcatggcggaactgctgggcaaggagttcctcggtgacgtggtgcacaacaagagcaagaccgacgacaagaaggtcttcgccaatctcgtgaacatccgcaaggcggagcgcgagaacgacgacggtgacatcgtgccggtgaaggtggcggagccgctgaccgaactcaagatgttcatctgggacatcgccgacaaggagatgtgggacagcatcttcatcgacggcatgtacgaagagaagaaggacaaggacggcaacgtcacccacaaggcgaagtccaagaacgtcttgcaggagtacatcatgtccgccctgaactgggacgagtgcccggttgccgaactggtcaagagcggtgccaccgcgcaggaagcgaaggaactggacgaggccatcggcggtgcggacaacgaggacgacgagccgccgttcgagacggagcaggaagctgccggtgaacctgacctgaactcgatctaaggagacgctgcgatgctgaccgatgcacagaaggccaagctcgcagcccatgccaagaacaacgccatgccgggattcagttcccggcctctggtcaacggcatggtgctgctggtggatggcgactacgctgcgtactactgcgcaggcaacgacgagacttccgagcgtcaggcttgggagaacttcatcaacatgatccagcaggcgaaggagcagtgcggcgctgagtacatccgagtgcacctgagcagcagcggctgcaacaaggggcaccgctaccgcgtgagcatgtccccgacgagcaagctgtatcaggcacagcgcagcaccgggcgcaagccgaagaactgggcgtacctgcgtgagcgcatggagacgtacgagggcaacatcttccaagcggtgcactggatggaccgcgaagcggatgacggcatggcgcttgcgtcggtgtcggcgttgaagaagggccgcatggattgcgtgctgactgcggacaaggacatgcgaatgttcggtgggctgcacatggtgtggaagaccaaggcgctggtcgaggttccgctgaacgcatacgatgtcgttgcgcacggcaagcagtacggccacaagtggttctggatgcagatgctgcaaggcgatcaggcggacaacatcctcggcctgccgcgtgtcggtgaggtcgctgcggcgaaggcactggcaggcaccacgaacaacgccgaggcgctgcgtgccgtgctggacatgtaccgcagcaagatgggcgacgcgtacgccgatcacttcgtggagcaggccgcgctgctgtggatgcgtgtcgatcccgcagcccgtgtcgatgacttccgcgacatgcctgacgttgtgtggggtccggacactcgccgagcaatggagcgcatgctcaagcgggtgcacgatgcacgatgaaccgcgacgactcactgcaagtcaggtacccctcgttcgttcccgtcttgcggccgagcaaggtggtcgttgtgacatctgccaagggccgctcggtaccaaggcacctcatgatcctgtcttggatcacgaccacggtacgggagcgattcgaggagtgctgcatcgtggctgcaatagcggtcttggtgtggtcgagaatggcgccaagcgtttcggcttcgtgtcccggctgatccagttctgcatgggactcggcgcgtacctccgcaagcatgaggagaaccgcaccggcctactgcatcccacccatcgtacggctgacgagaagcgtctcctgcgtaacaagcgagcgcgcattgctcgcgccaagaagaaggagacctccgcatgagtgacctcgtaatccacaagactcccgcaagtttcttgcgggccgcaccgaagacgggcgcgaagatcgccaccatggacatcgagaacttcccgatgctctcgtaccactggggcatgttcaagcagttcatctcgccgattcaggtggtcgagcatacgacgctgatgtcgtactgcttcaagtggctggactcgccgcacgtcttctacgacgacaaccgtggcatgggccgcaagatgcgcaacgacaaccgactgctcaaggggctgcaccgcatcctcgacggcgtggacatgcacgttgcacagaacggtgagcgcttcgacctgccgaagattcgtgcccgcatggctgtcgagggttacaccccgctcaagccgaccaaggtcatggacacgctgttgcagaacaagaagcacttcgggttcgcatcgaactcgctggacttcatgagcaacgtgctggacctgagcaacaagaagaagaagcacggtgcgttccccggctttgaactgtggctggaatgcttgcaggacaacctcgacgcgtggaacgagtgcaaggaatacaacatccgcgacgtggttgcgaccgaggagatgtacctgcgcctgcgtggttggtacaacggcggtcacaacgtggcagtgttcaacgactacgacccgaccgagggcgaggccgaacaccactgcgacaagtgcggcagtccggacaccgtgaaggacggcaagtaccgcaccaaggtcggcgtctatcaggcgtaccgctgcaactcgtgcaacggctggagccgtggccgtgtgctgctgctcgacaagcgtcagcgttcccacatcaacatgagctaaggagccacaatgaatcagcctgcccatgccaaagcctaccgcgtcggcctcgttactgccgaggacgtaggcaatggcgtggtcaaggattccctcgtgtacttgcactcgcaggtaccggggagccctgacctgttctacttcatcccttcccctgaatccgaggaaggcttcccactccgcatgaatcaggtgacccgtgaacctgccttcgatcatgtcgtgcctgcgtacagcgacgaggcggtgccggtcaatgagtctgtggtactggacgtggctgacctgagcgccgaggttccgcagcctaccacaccgccgggtcgcggtggtggcctcaagtacgatgcgggcaagccccggcccacgctgctgatgcgtggatgtgcatgggcgttgcagggcgtgagcgcggtgcttgcgttcggtgcagcgaagtacaaggaagactcgtggcgcgaagtcgagaacggcgtgagccggtacagcgatgcgctgatgcgtcacctgttggcatggctcggcggcgaggagaacgacgaggaatccggcatgccgcacctgtggcacgcagcaacgaacatcatgttcctgatcgaactgacccgcaacaaggagaacgcatgaaccccgcactgattaccgccaagaagaacgtcgagagcatccgcaagttcgtgaacaacgccgtgcgactcggcagcgatctggacgaggcggtcgagcaggccatcgccaagtattactcgctgcgctccgaggatgcgcaggccgacatcttcgccgccatccgccacgtgttcgatgaacacccgcacgacggcactggccgcaagctcgcactgaccgaggctctgcgccgctacgagattggccgcattcgcggctgatccacctgacacgtttcatctggagaagaacatgtcgaagccttacctgacccacaccccgctggaatcccgcaaggtcaccccggcgatggtgaagaagtacaccggcgaagcccgcacgctggaggatcacgtccagcaatacctgatgcagttcaagtacgatggtatctgcgccatcctgttcgtccatgcggatggatcgcaccacatgaagtcccgcaccggcgaggacatcgtgaacttccgccacgtcggcgatgcacacagcactctgccgtggatcaacatgtgcgagttgatggagttcgatgaagaccgcccgatgcagtacaagtccggcgtgtacttcggcgaactgtggcaccccgagtggagcgccgctaccatcaccggattccacaacacgagcgacccggagaagtggatcgccaccaagccgaaggcacagcaggtgtccttcgctgtctacgacttcgtgacgtgggcagagtgggaagtaggtgtcaccaccgtgccgtacgccgagcgcatccgccgtctggaatggatggaggccatcggcactccgtggatggacagcgcaccggagggtgcgaagttcccgcccatcttcatggcggctgacctcggcatcttcgcggagaacaaggagttcacctcggcgaacgagatggcgaacttcgtcaaggccaacgtgaactgcgacggcgtgatcgctgtcgatccgtggggcggctggaagcgcggcgaacgtaacctcgccaagatcaagctcaagcccacgctgaccgtggacgttgaagtcgtcgggtacgaactcggcaagggcaagtacgccaacttcatcggcaaggtcctgtaccgctacaaggatcaggtcgggaagtgcagcggtatgaccgacgaactgcgtggcatgaagttcggtggtccggtggacgagttctacaagctcgcgtgggaagggcgcgtgatcgaggtcgaggccatggaggagagcgcacacggcaagctgcgtgagccgcgcttcaagcgcttccgcgaaggcatcgacgcgacggaggtggacgcatgagccggtactaccggaagcgtgtcaccttcacgcaggttgactacgacttcgacaaggcgctgcactacatcacgttgagcagcacgtggtccggctgcggtggcgggcacctgttcatcacggagtatgagatgtcgccggaactgtgcgcggactacgtgttcatgcgcaagctgcggcaggccaagcgcaccgcacgcaagaagcatctcgcagcactgcggcggtacaaggcatgagccgcgatactgtcgtggtcacgtacctcggcggaccggaggacctgactcgtcgggtccatccgcgtgaggacatggcccgtggctgctggttcgtgctgtgcgtacgcccggtgtactcgcaggattacctgcgcagcaacatgattggtgacggcgagcgggttccgaccaccaaggcgcggtacgacttcatccgcgtccctgccaaccacggtgagcagtggctcgccatctacaacgaggtgcactgatgcacatcgaactcacggacttcatcgtccgacagtgggagacgtgggaagaccgcaaggtccacgtcatgtacgaagtgcgcgccgtcaccgaagacggtacgttctccgagcagttcaccgtgtcacactgtcccatgcgcgggcaggataacaagcgcaagcagctgcactaccacatgaacgtggcacgcaaccgcgtgacccgacgtgccatcgagaaacgatacggagactgacaatgaatcaagtggaactggaactcgaagcgcactgccatggacgtgagcgtatctccgcaagcatcaagaagaacgaggaggcgggtcgtgcggaagccaacccgtacacgaccaagctgtaccgcgagttcctgttcccgatgatcgagttggtcaagctggaactgaacacccgcacgccgggtcgccgcaaggcacacgtggttctgctggaaggtatggacgtggaggcgatctgcttcctcgccatgcgccacggtatcggcgtcggcatgaactccacgactgcccgtgatgcagcagtgcagatcggccgcgccgtgtatcacgagtacctgctgacgcagttcgccgagattaagcctgctctgttccactacctgatgaacgacatcgaccgccgcatgtcctcggacgagcgctacaagatgaacgtgatgcggaaccaagcactcaaggctggtgtgaagttccacgagtggggcaacagtgacacgcagcaggtcgggtattaccttctggatcgcatggtggacgttggcctgttcgacatccagaagtacaacgagcaaggcaacacgaaggtcgagttgaagttctcggatcgtgccgccgcgttcgtcgggcagatcacggacttcgttacgatgaacgccccgtactggactccgtgcattgagccgcctctggactggaacggcctgaccggtggcggttaccacacgccggagatgcagagcctcgatccgtacctcgtacacacccacggtagcgcccgcaagttcttcgagattgcggacatgtccaaggagtacaagtgcatcaacgcgttgcagcgtacgaagtggcgagtgaacggagacatgctggacatcatcgccaacgtctcgcagcatcacgacatggaagaaatcctgatgcagggcgacagcccgaagccggtgcgcccgtcgttccttgacgacaagaaggcggaggacttcaccgaggaggaggcgcatgccttcaagacgtggaagcgcgagactgcaaactggtacacggacgagaagctgcgcaagctcaagggctaccgcttcgcttcggtgatggcgagcgcccggaagttccgtgagttcccggccatctacttcgtgtacttcatggacttccgtggacgcaagtacgtcaagaccaacggtatctcgccgcagggttcggacttgcagaaagcgttgatcgagttcggcgagggcaagcccatgctgactcagggtgccaaggattggttcatgattaccggagccaaccgtttcggcgtggacaaggtgagctacaaggatcgaatcaaatgggtacaggacaacgagcatctgattctggactgggcacgcaacccggtggacagcagcgattggatgaaggcggacaagccgttgcagttcctcgcatggtgcttggagtatgcgaagtggaaggtgcacggggacaagttccgcagcaggatcagcgtgggtatggatggttcgtgcaacggcttgcagaacttctcggccatgcttcgggattcagtgggcgggcgggcggtcaatctattgccctcgcccttgccgaacgacatctatcagatggtggcggaccgcgctacgcagttgttgcgggcagaagaagcggacgccgatgggctcagggacttgtggctagagcatgtgctgacacgtgggctggtgaagcgctcagtgatgacgctgccctacggttcacggcggagttcgtgcaaggacttcatcatcgcagattacctcaaggcaggcaagttcccggaactgtcgccggagttgtacgagaaggcggcgcagtacctgtcgatccgagtgtgggcagcgatcggtgacgttgtggtcaaggctcgtgaggcgatggattggttgcagcagtccgcccgcacgatcatcaaggcaggcaacgacaacatccgctggatcacgccgaccggcttcccggtggtgcaggtgtactactcgaccgaggtgcaccgcattaacacgaagctcgcaggcaacatgaagatcaaggtgcactccgagtcggacgaggcaaacatcaaccggcacaagaacggcatcgctccgaacttcgtgcacagcggcgacgcatgccacctgaccctgaccaccaacgactgcatcgaccaaggcatcacggccttccacatggtgcacgacgactacggcacccacgccgcagatgccccggcaatggccctgagcatccgcagggtgttcgtggacatctaccagaggcacgacctgctgcaagagttccgtgacgcgtacacgggcttggaggaggctccgccgatgggggacttggacatcacgcaagtcattgattccctttacttttttggttgagggagttttggtacccgtataaccagatgaaacgtgccccgctcttggcttcggctgagggcggggcgctttctgtcgcccgagttttggtacccgtataagcaggagaaatctgcatgagcttacaagcagtccgcgttgagtccaaccgactcagcgaggaacagtaccgcctgttgcaacgagcgtgtggtgcaatggccaatcctttggtcaacggcaacacttcgcagcatgaagctgggttcaaactcggcgtgcagttcgtgttgcagttgtgccgagacggttgggttgaccagcgctaagtcattgatagttgctctgaacctgaacgcgttcatcggtatcaagattttcacagtgaacactgtagtccatacataggagattagaatgggcctgttatcaggtatcaaaggaatcttcggtggtggtgatacgaagaaggctgcacagattcaggcgcaagctacccgtgatgctaccgctgcggctgtagcgaacgctgggtatgcagctgaggctgctgccaaccagattcgtaacactcagctgaacgaagctgccaccgagtacgcaaagtcactcttgcagaaaccgcaggaacaggtcaacgtacgattggctccgcaggatcaggtcatgacgactgaccgaacggaacgccgtcgtggtgtccgtgacacatacctgaccggaactccgcgttccttcttctcgtgaggtacgcatgaatctagtcaacactgcgccgcaacggtgggcgcgactggacggtgcacgaggcaacatcatccgccgagcggaacgattcgccaagtggactatccacaaagttttccctgacagttggtacgacggcaacaacggtacgatcagcaatgactggcaatcgttgggcgctcaggccgtgaaccatctgtccaatcgactgatgcaaactctgtttgcaccctcccgtccgttcttccggcttggtccgaagaaagccgctaaggaacaactggctaccattggtccggaacaacagcaggagttggagaacaagctctcggtcgttgagcgtgaggcagcagacgtagtggacaagttgtccttgcgtgcgaagctgtacgagatgctcaagctgcttatcatcacgggcaacgcgatgatgatcctgcgaggcgacaccatgcgcgtactgaacatgcgttcgtatgtcgtgcgtcgtgacctcgacggtcaggtcatcgagttgatgatccgtgagcgagtcagccgcgaggagattgatcccgaggcactggctcttgccgaacgatccggtcgcttccagttggagaaggacgggcacaccatccgataccgctgggtcaagatcgatccggtcaccaagaagtacaacgagtcgcagtggctggactctttcgagttgcctgcgaagtggtcgtcgtcctacaacaaggacacgctgccgtatcgagcagtaacgtgggacctctcctccggcatgcactacggtaccgggcttgttgaggactacaagggcgacttcgctgccttgtccgcgctatctcgatccaccgtcaacgccgccatcatgaactccgagttccgctggttgctgcgcgctggtgtgatgacttcggcacaggaccttgcgaacagccgcaacggtgacgtgctgtacggtgaacccggtgacatcactccgctgccttcgggcatggaggcgaagctcgacgtgaacatcacggtcgtgcaggagtacgtccagcgcattggcgcaggattcctgttgcagtccgcagtgacccgtcaggccgagcgtgtgaccacgatggaactccgcatgaacgcggaggagttggaaggtggcctcggtggcgcgtactcccgtcttgcgggtgacgtgcagattccgatggcgacgttctgtttggagaactccggctacagtctcaagaactccgaatgggaagcgacggtcatcactggccttgctgctctatcccgagtcggtgatcgtgaccgcctgaactccttcctcaattccatcatgccgctgatccaagcgaaccccaacgcggtaatcccgcgactgcgcattggtgcgttgatttccgacatggcctcggccgaaggtatcgaccgcaacaagtacgtgctgactgatgctgagttccagcagcagatgcagatgcagcagcaggaagccctcaatcaacaagccgccagtaacatggtgaatcaggagacacaagcatgaccgacaacgccaacccgaccccagccccgtccgctcctgctccggcagcgccgaccccggcaccggctccggtggcaccctcggcgctgccggagca

SEQ ID NO: 4 - DNA, 201015 bp, unidentified
  misc_feature 1..201015: note = the genomic sequence of a bacteriophage
  source 1..201015: mol_type = unassigned DNA
tcgacgtagtttctgtctcgagattccgctgagatagaaagattgttctttcgtaccacatctgtagactagtggtatgaagatcaagaccctcctcgcagccgcactgatgaccgtcgcactttctgggtgcggcgagatcatagaagaatcagaaatcattcctggcgcagaagctgagatggtagcgatgtgcaatgtgaatggaggctttgttcgcggatgggttacaccgatgaacaaatactcagcaggcaaggtttcgatcctcgaacagtacaggacagcctaccacgttgaatgtgtcaatggtgcgaagattgacaagctgttcgaaggcaagacaatcagataatatcaacccaagactaggagttagtcatggagtcagcaatttacaaggacctcgaccctgaggtggcagcagagtgcggctacttcgaaccgaaggaacccttcaatcaaatcttctcgcagccttgggcgcgagctgcgatcagcgcatacgaccagatcatctactacccgggcagtttcggaacgttccatgatggtcacgtctcagtgatcaagcgtgctctgcgaaagtaccccggcgcctggctcgtgatcgcaccgagcaattcagactacgcttcccagaagtacggcgcatggtcggaactcgcatcgaataagcatcgctacgacaccatcaagaaggtgttggataagcatggcatcactgcctcgatcgacattgatccgatgctcaacaaccgctgtgatcagaacttcactgaccagctggatgccttcctggctgcgggtaagcgcgccggcatctacgacatggccaagcctccggtcatcctgtgtggcaaggatcgtgctgacttccagaacctcaacaactacactgacaaggttatcgtcgagtggtttgaggataccactgggctgagcacttccaagctcgagaacaagaagcggatgaagaagcatctcatcctgcgctgcgtgaacgaggaagagttcaatctgttctgcgagtatttcgaagaccagtacctcaccatccagccgtattacctgcacgatgaaatcgagtctgccaagaaggcagctgtgatgattggggcgacccacaccaactgcaaggaatacgctggcttcttgccttacatcaagatcagccgccacttcaagaaccctctcgagaacggaaccgtgaacaattggttccttccgaatgacgcggttcttcttgactcggacatctttaccggaaccacgcaggcttgggttgagtctatgggcggaaagctccatggactgatcaatctcaaggactggcacggtgcctgggagctcctggatatcagcgacttccgaaagaaagaatgggcgtatccctttacggatatctccagccgctgtagcatgcaggcattcgataccgcctaccacgaccacttcaacgaattcaaggaaaagctcagccatgtccatccgtgaaatcatctcgccgaacgttaaggccatccttgctcttggcatcgaacgcgatacgccttttgagcttgatgctctcctgcacaagaatggtgtcatcgaaatcaacacgtcgctcgaccttctccccgaagtggatcgcgcgttcgagattttcgaccagcttggtgctgtgtatccggtctcggtgaccggcctggaaaacgtggaaagcggcgttggttcgcatcgcttctgcgcgtgggatggcgaattcgcggcgctcctgaccgaggtggtcaagctgatggagactcctgaactgatccagattggtgatcatctctgggagtttgagagcgtctcgaagtatttccgtttcatgcggtacgatcagggcggtgaacatttcccgcactacgacagcgatttcgttgtctacgatcatcttaaaaccttcggacagtcggttcgctacgccacgaagtattcgctggtgatgtacttcaacgactgcgagtcgggagaaatcgctttcatcgacaatgatccgaacccgacaaagggtgattggaatcgtcaggcgactgatgctgagatctccttgcgcatcaagccggcaaagggaaagatcgttctcttcccgcacactctctgccacactgtgctccccttcaccgataaggacagccagcgcttcatcgtgcgcggcgacctgatcttcacccaggcataagacatgactctcgtcccggtaaaccagaacgaactggaaatgtcggttcggatgttcaagcacatgttccgaaggaaggatccgtatcagaagattctcaccctgaagaactacttcttgaactggaacatcaagaaggttgtagtgggcgtctcgggcggcgttgattcggcactagttctcttcctcctggctcatatcccggacgtcgaagtccatgcagtgacgatcgatttcgacacctacagcgatgtctttgaccagggctatatcgagctcttgcagctggctacgacgcgcttccgaaacgtgaagtggcacaagaaagatctgactctggctttcagcgagatgatggtcgccctggacctcgagaaaagttctgatgaagtcttcgccaacaccagctatgcgatgcgttacctgggcttcttcgcctacgctcaagcactcggcggcgtgaccatcggaaccaccaacctggatgagatgggctacgtgggctggttcgggaagaactcggatatgatggtcgacatccagccgatttcgacccttcacaagttcgaagtaatcgagtgggcaaggctgttgggcgtacctgagcgtgtcgctgcccgcgttccgacaggtgacttggtcaacggtaccagtgatgaagaaaacttcggctgcacctatgacgaactttctttctacacgcaccaccgtctcaaagacccggacatggaagtttcgcccttcatggaagcgcatttcgaaggcgtagaaaggttgcgaaagaaaaatctgcacaaataccagggccagaagttcaacccagtcttcctgtaaagaaagatttctcctgtattatttgtagaacataaaccgaactgaggttcagatggaaatcgcgctctggctctgcttgatcccgatcacgtgggcggcaatagcacatttcgcattcaaaaggacgatcacctggaaagaaggtctgctccagggcggcggcatcgcactcgtggttctcctgatctacggctgcatggcatacagcaataccgccgatcacgaaatcctcaacggacaggtgacaggcaagaaacagacctggaccagctgctcgcactcgtattcgtgtaactgctacacgacttgcagtggcacaggttcaagtcgatcctgcacccgacattgcagcacatgctacgagcattccaacgactgggattgggacgtcttcacgacggtaggtaacatcgagatcgatcgtgttgaccgtcgtggtagccgtgaaccacctcgttggactgcggtacagatcggtgaacatgctgcggtcacgcacacctacaccaactatgtcaaggcagctccgagcagcttgttcaacgtcaagctggcggaaaccgaggcaaagtccaaggctgcgattatccctcagtacccacgcatctacgactactatcgcgttgaccacaccattgatatccaggcaggtgtcgcgaacagaaaagcctgggatgcagagctggacgaagtcctgaaaactatgggtgcggcgcgacaagtgaacgtcgtgttggtcttcgtaggcaagcaaggtcgggagtacaaagacacgttggagcgtgcttggctcggcggcaagaagaatgatgtggtaattgtggcaggcgtcacaggcaccaagatcgactgggttgaagccttcacgtttggcaagtcctccggtaacggaatgctcgccgtcaagatgcgcgacgagttgcagaagtacggtaccactgaaaatgcgaaggaaggcgtggctgtaatcacaaaggtgatcgcatccgacttccatcgtaagaacatgaaagactacgaatacctgaaggctgagggtggaccatcggcaaagcaagtttcctggctggttggtattgtcctggtcctcttgatggtgacaactttccttcttcacaagtacgatgtgttcaacgaggagttctacgacaggcacccgaacattcgctacatccgaaatagttttcgtcgttaatccaaaatcacataaacccaacaaaggtattgataatgaacattcgtggcaacaagggctcggcgtggattgcagtgctggtcttcctgggcatcctggcactgggcgcagtcttcgctgtaggcagctatgtcagcgcagccaactacggcaacgaagccgagcagcgcctggaagcgaagtggcaggacaatcagaacgtgctgggccagtacaccatcaagatcggtgaaatggcacaggtgccggaaatcgcgcgtgatgacctgaaggaagttctgaaggcaacgttcgaaggtcgctatggcagcgagggcgtgagccgtggtgctggtgagcagaagaccttccagtggttgcaggaacagaatccgaatctgaacccggaactctacaaccgactccagcagacgatggaagctggtcgtaacgagttcaaggtctcccagacggaactgttggatgagaagcgcgcctatcagacgaacctgggctatgtctggaagggcttctggatgaagctggcaggctacccgaaggtcgatctgtcgaagtacaaggttgtggtcggggctgacacggcacagaagttcgagaccggcgttgacactggcgtcaagctgcggtaataagtagaagtatccgacgaggcgctccggcgccttttcggttgatacgaaaccatacatcgttataatcagcaaaagaaaggagttttcttatgcagcatgatctcgcagttttcatcgggcgtttccagcctttccatctgggtcacctccacgctattgaggaaggcctcaagctcgccaagaaggttctcatcctgatcggtgacaccggtggtcctcgtggcctcaagaatccctggaccgcagaagagcggaagcagatgattctggattcgctaggcacctaccagcacgaactcgtgatgtttgacattgcatacgacatgccgtccaacacggaatgggctggtcagattcagagcattgtcagcaacgcctcgaactggcataagctgcccagcgtaattctgatcggtcacgagaaggacgcgtcgagcttctatctcaagatgttcccgcagtggaagcacatcgacaccggcttcgaagaactggaaagcggacttctccgcaagtacaacgccaccgacattcgcaagatggtctggacgaacacgctgcattacgcaacgggtctcctgcatccgaccacgctgacctacctggtcaatcacatcaagcacaacccagctatctatgaagagtttctcgaggagtacggcgccatacaggcttatcgcaaggcgtgggcaggttcgccgttcccgccgatgttcgtcaccactgactgcgtggttatccagagtggccatattcttctgatcaagcgaggcgaccgacctggaaagggtctttgggcgttgcccggtggcttcctggatcagaccgagtccatccaggatggtgctctgcgtgaactgaaggaagagacgaacattcatctgcaggatgatgtgcttcgccgttgcattgttcgcactttcgtccatgatcgtgcaggcggtgtcagtgaagaagaccgtggcagaatcattacgcatgtgcatgtcgtcaagcttgccgacgggaagccactggccaaggtcaagggcggcgatgacgcagccgaagcacgctgggttccgttgggcgaaatcaactaccgtgagatcttctccgaccatggaaagatcattgaccgcgctctgagtggcgtctgaggaattatcatgaaggacgttatcaacggctttttcgaagaagcagaacgtttgcaggctctggcagaagaacagcgcagcaaggctgctgcaatcctgacaccgctgtttgatctccagcatcggcttgcatggtctgttcactgcgagcctgagttcaaagaactggaaaagtggtatcgcaagccgcgtgataagttcgcaaccaatgcgaaccgtcagcattcttactacactttcgacggaagtttctacgatctctgtgaatggagcgacggtgactcggctgactccattgagctgcatcctatcttcctgacagatgcttctgaggaagagaagaaggaagtaattcgacaggcatatcgtgccgatatcgcagctgtagaaaatcagaagcaacgcgcgaaagaagctgagctggaaaaggctcgcaagcttctcgctgaaaacggtgtgtctttctaaggcacactgttagactataatcacaccaaacgtagaaaggagttttctatgattttcaatccgatccttgcaacagacagctacaagttctcgcacttcatgcagtacccgaagggtaccactctcgtcaagagttatgtcacggcgcgtggcagcaagattcctggcgttaccgcagtggtttgtgctggtctgcaaatcttcattcacgaatatctcagcaagcgcgtgaccaagaatcacgtcgatcaggctgaggcattctgtgccaagcacggcgttcctttcaaccgcgaaggttgggacctgatcgtaaccgatcacaacggctacctgcctgtcgagattcgctcggttgaggaaggtacgcctgtgccgctcaacgagctgatgatttccgtgatcaacaccgacgagcgtctgccatgggtgacctcgtatatcgagacgctcctgctgagctatgtctggtatgcctcgactgtggcaaccaagagccgcgagatcaagaaggtcatcaagcagtacctggacctgacgtcggacaatgctgatgcggaacttccgttcaagctgcacgacttcggttaccgtggtgcaactcctggcgcagctcatgttggtgccttcgcgcacctgatcaacttcatgggcaccgacaccgtcgcaggcatcgaagctgcgatggagtactacggttcggatgtctgtggttacagcatctcggcatcggagcattcgacgatgaccagttggggtcgcgatggtgagttcgatgcctaccgcaacatggttgactcctacgccaagcccggtgcgatcttcgcctgtgtgatcgacagctacgacaccttcgccgcaatcgatatgttctgcgaagaccgttgtgcaggtggctcgctcctggacatcgtaaagaatcgtggtgcgactatcgtgctccgccctgacagtggtgacccggttcagatgccgattgacgtcatcaagtacctgatggaaaaggtcggctacgagatcaacaacaagggttacaaggtcctaccgagtcatgttcgagtgattcagggcgatggcatcgatattgaagacgttgagcacatcctggagaccctggttgaggatgaaaagatcagcgcctcgaacatcgcatttggcatgggtggcggactccttcagaaggtgaaccgtgatacgttcaagtttgctatgaaggcgtgcctggcatacatcaacggcgaaaaggtagacatcatcaaggatccggtcactgaccctggcaagaagtcgaaggcaggcgacctgagcgtctatcacaatccggaaactggagagtggaagaccatcactgaaggttcgctggattcgttcgctttcaacaagccttcgagcgattggtatcgcaaggactatgttgtctatagccactacggtcgcgatactttcttcgactatgtggacatggatactgttcgtaggaatgctgctctttaagggcagcttccttcataattactatggtgagataaatgattctcaagagcgaaatcagaatgtccaaggctgaaattgaaagcctcatccttgatcacctgaaaaataacaacaagcacaatctcaagattggtcgggtcagcttctctgttcgtgagtctgacgaccactatggtggctacactccagctgatcttgaaggtgcaactatttctgtggaactggagcttgacgatggaagagaggatcgaagataagattttggcttatctgcgtggcgaagttgactatgatgcacttcaactgctgcgtgatgcaagaaacgagatcgaaaaactgagagcacgtgctgttgatcttagctgggcagcggacgttgccaatgaccgtgcagatgctttcgatccgaggtacaactaatgtcactgaccaacctgttttcttcagggattgaataccggaagcgcgtcatggtgctggtcaccaagcgcatgctgaatccgaaacggggtggcggagtctctacgtttgtgcgaggcattgctaagtctatgcctgacgacacactcgtagagattcattgcgttggaccagataatcttgatgtctatgagattgatcatccgaatgtcgtgacttatggttatcctcagatggtgaagatcaaggcagaggagccaggcatcttccagcgcatcatgatcaacttcgatcagatcgaagaattccgccacgccttgaacaagtcggtgttcacggaagagaagctctatgatgcgattgtgactacctgccctgagtctgcattggcttgcatttccttcggagcgatgatcgaaccattcaatgtcatctataccacacatcacggcttgatgtctgacagcctgagcaaggttcctttcgatgacgctgtgatctacttcgccaacgaagtgattccgaagtctggatttgtcaccaccgtgactcagactcctctgaatgctgagtggctgcaggaaaagcatggtgtcaaggttgatcacgtgattcctctgctacctgacgagcttcctccttttgctgatatggcaggtaaggaaggcgcactgttcatcggcaagtacgagactggcaaacgacctgagctctttgtcgagatgtgcaagcagactggcatcaagggtaaggtcatgtgcggtggtatcaaagctcccgacgcatggcacaaggctttcaaggaagctggagttaccaactacgagatccgtcagaacctgcaaggcaaggaaaaggaagatttcatcgcatctgcgaagttcactttcgtttcctcacagaacgaatcgtacggttaccttgcactagaaggtctgttcaacggtcctaccatgattgcagacagccgatgggcgaagttctgggaaggctatggtgcaactctgttcaccaaaaagaacatggctgaggtggcaaaccgtctcaatgagatgactctgtgggacaacaccaagctggtaaagatgctggatgatgctgagaacaagtgggttgatgtgatctgtaatcgaaagaattacaacaccaagcctaactcttcgatgctcaaatatgtgacgccggaatggcagactcttgctgacctagcaaaggcgcgcgatgttcgtagcctgtcaagtggagactacaagcctctcttcgaccactgcgagatcgtccatactgataatgaatcaaaggtgagacgtgtctgataaaccaaccaaggaagaaatcgaaggtctcaagagattcatgcttgagaccttcgatttgccctatggcatgatggaatgcaagaaagccttgcatgaatctagagacctcgtagaggccgcaaaaatcttgctgcattatcggatgcttcatatctgatatccagcattccttttgacgaatgaaattatcaattacaatccttgcatgaaaattgtccaattcaaaaacggtaagtttggtgtcaggcgctggaacttcttcaaaggtttcttcggtgagtatgaattcctcacttttagaggtgaatgggaaacacgcgctggctacaacattgaaaatatcgaatacggttctaaagagacggcggaaggatacctgaaagactacgttgattctgaggcgtctttccaagcattcaaaaatgctgcccgtgatatgggcaaaccggtaaagtgaagctacatcgtcacgactaatccagtgacgcaaattatatgatgaacaacaggttgtccaactagccgtcggctaagcgtagtcgcgacgtgagatagagtgggcagggcgagcaatcgtcggaagtgcgtaatgtgagaataaggaaccgagaggttctaaagtatgacctgctctgccacacggcaacaggtgttaggcaagttgattactaactgaattcttgtctatggcgtgaatcccgcaaagggaccaaagtgcaattatagggcgataccgttcacctcgtcctgctgggaagcagattgcaagtttgagtggtgatggtatggacgcagttcccttttctcatcgtcgcacttttggtggtaatagccaaagtgtggctccaataaaccgcaattcttttaaaaacatattttatgaatcaatttcgatatgcaggtataggatctcgtgatactcctgtctccttaaaacaaacgatgatggacatagcttacttcttagcgtatgaagctaatgctattctcgtatccggtggagctcgaggtgcagattcgttctttgaggaaggatgcgatcgtgcaggtggtaacaaagagatctggttgccagaagcaggcttcaatggaagcaagtctaagttgattggtgcatcgaaggatgcctatatcgtagccgagcgatatgttggtcattggaagaactgtaaggcatgggcacgagcagcacacgcacgaaactgtcatcaggttctcggtgccgatctcctcactcccgtttctttcgtagtgtgctggacacccggaggtgagagagttggtggcactgctacagcgatttctattgcagaagataagggcattcctattctcaaccttggatcgaaagactggtttgagacagaaatttctgattggctagaaatccggctaaattgacctttctaggtactgtctgtagactgtatggactaaggtgattaggagttagtcatgggttacggaacacgtccgaacgatttcggtggaaacatcagaactttccagcctgacaatacgaaagatgtgctgtacatcgacacgactttttcgtcggtcacgttgaaggagatcatggagaagatccgtgaacacttcggaagcgatgatatcgagaaattcgatatcgaggctcagtacatccacacggattgcctgggctacgactgttatgaccccggcgactactccagcttcatcgtcatcactcgcacaggaattctgtaatggctgctcgattcagtcgtcacgcgaagcctctctaccgtatcaaccagcacggtgagctctacaaggcgagtgaagaattcaagaccaccatccgtcgagccggagtctggaaccgccctgcatgtttccgttggtgggctgaaggatgccgagagatcaacacctgggtattcgattcccagggtcagcatcgtctcattgtcggatacgatcctgagactgacctgctgtatctcgggcgcaccttgaccgaagaacgccacctccccaaccgtttcaagaatcgagacatctgatgactgctctgctgattggctccaacgcacttcgcgcacacggcatcgctgttgagcgcaggaacctggacatggacttcattgctacgatggattccatcaaggaaatgatcgatcggaacaagacgcgcttcgtcaagattcagcacagcgaagatgcgaaccatctgttcatgttccctcgtaatgggaacgacgccatcttcgatatcgaaatcgcatggctcgattctgtcagtgataccctcattgacatcgtcctgaacaacggcctctacaagatgaccgaggagggctactacgccgtttctccgtcggttgtgctggcactcaagctgtcgcacaagtacaagaaaaactcgcgtcacttcctgaaaacgatgcgtgacattcagatgctcaagggacttggctacaaggttccgaagtgtctgagtgagtggctcaaggatcgcaagaagtggacctacgactataagcatcccaagttggaaggtggtgtgaccaaggctgacttcttcaaggacgatggcattcgctacgtctacgatcacgacagcatccatgaagctgtgcgtcatctgaaaaagcctgcctatcgctacttccagcctgacggtgaggaagtgggcacgtcgaaggaagacttcttcgctcagccgcgtgaggtacagcttctggcagtcctcgaggaaagctatgtgctgagtctcgagcgcgccattgttccgttcaacttgaagactatcgagcagcggaagaaggcttttgacactgctctggaaaaggtctgcacgagcatcacgtctggttggttccggaagtttgcctgggataactttgacgaagtgaatgacctgtataatcaggaatatgtggaccgcttctggcgtgaagtcgaaagtggcaatgtgaagccctacgtgaaggaagaaagcaatggctactaaggaacaagtggacgagattctgacaaagacaaaggaactgcgagaccttatcgtctcggcggaccttgtgggctatgtcaacgtgatggtgaatgaagagttctctttcggacctcctctcatcaatgagtacctggatgtacccgatcgcccgtggcattctagcgactgctacatgggcgatgaaccttcctggaatgcgagtaactgctaatggctaaagatgatttcgatcagcgagttgaagtaatcaagctccttgtcaatgaactggataaggagttgtctgaactcaatgtcaggcacaatgtcgattacaagattgacatgcaagtccaagacaagcatggttcttacatcgtaggcacatcggagtccagcgactggtctgcgagttggtgctgataactgtcctataaaggaatgataatgaagaagattctgttggttgctgttctagctgccgttgttggcctgtcgggttgtaccgatgcagaacgcgcaagctggggctcgctgggtgagcaggcaaaggtcacctgttacagcggtggtcaggtcatcaaggaatacgaatccaccggtaaggtgatgaagctcgatggtgacggcttcgccttcaagaacaaggagacgggcaagttcgttcgcgccttcgccgactgtctggtggaagagaaatgatcagtccttgtgatggcggcggaagtgtcgacccgggtcgcgccaagtttgaggaagctgtcttccggcagtatttcatcaagcatgttggaagtgatctgaggatgaagccaggtatcgtcaacaaggctgagttctgcaagcgggacgaaaatggtaactacgtgcgcgaagaagtaagcgcaatgtggtttggttggaaactttatcagaaggaaaacgtgtaatgaccgtcgagaaagaacgtcatcagaagatcgccgcactcctggacagtgcttccaagcagcttgaagaggcacgccagttggcaggcaacgacacctatcactggtctggtcctacctatggtatgggtggctggatcgagtctggcgaatggcaggcatctagccattcttgctgaggaatgagaaatggaatacgctgattttgaaagccgtaagaagcgcatcgagcagttgattggtgaggctgagggcctgctcgaggaagctcgcgaaatgtccgatggtctctttgatgaaggagcaactcgctcctggcaggcaaagccgtcattcaggtttgaaggccctacgtatggtatgggcgggtcgctgcaggatggcgaatggtttgcatcgagtcagtcgtgctaaaagagtgaaagggtgggacattggcacttcggtgcctttgtccttttaggtaaaccaaaggaatatcatatgcaacgtgacttcatcgaaacctggtctggcgtcaacctatacatgcctgacccagatccggaatccatcctcatcgaagacattgcgcacgctctgtcgaaggtgtgtcgttttgccggtcatgtggatcgcttctactctgtagctgagcactccatccacgtctcctacgctgtacctccggaacattctctgcaagcacttctgcatgatgcgactgaggcttacctgtgtgacattcctactccgttcaagcggatgattcctgcctatgcggaactggaagacaatctgtgggcagtgatcgctgaaaagtttggcgtgccgttcaaactgcacgagactgtcaagctggcggatcgaatgctgctcctgtcggaacgtgatgcactcaaggaacactccaagcgccaatggcctgcggaatacgagaaccatcgtcgttgggaaggcttctatgaaatgaacctgacccaggaacaaactgctcgtgtcttcctcaagcgatttgcagctcttcggtagagtaaatactgggaagtaaaccccaacatggaattgaaatgagtaccgaagaaaaagtgagtgtgctgcctctgccggaagatcctgcttacctccagtggctgcgaaaggaaggctttgaactcgaaagcactgtcccgatggaatcagacagtattgtctgggttcgtaagacaaagtatggcgtgccacgttgtctgatgaatggtgttgtccttgtcgagatcgtgaagaccggcgaccagtttagcatgggcgttcgtgcctcggctaagaattactggggtgcggcttccatctatggcattgatgaagagaaccttgtcaggctgggtcgccagtacgaacagcgagtggtggacgcatggcgggaattgagcgcctaagagaacagattgtcgattaccttatcgcgaataaggaggcaatcttgatgacgcagcagtctcagttctgtggaccttgtggtggcatgaaagtcaccacagtctaccgtaacccagattgtggtcaaatcggagtctggctagatgattacagacgagaaacgggcacttgagccccgagatcgagagtacatcattttcgttctagatggagcatacgctcatggtgaaagtctatctgagcacctgcatctgtttgacgaatttgagatcactcgtgcacaacgaaacgaagttatcttagcatccgactttggtcaagatgaggatcttgtttcagcaatcactttatttgggtgacctatgtcttatacttttacggacggcttgaaagacgtcatcaacggtaatttttcaaacggtggtgagtccaatcgcaggtacgaaatgtgcaaggcttgcccgctgttcaattctgtcgttctcacatgtggttcttgcggatgcttcatgcctgcgaaaaccaaactcgttaacgcaacatgccctgagggcaaatggtaaaatgacctaccgagacacgtatttcttcgacttgtgccgtgaggctgggttcgacgtaaccgatccgcatgattgggtcgaaatgagcattttctctaaggaaatgcttatcgaagaatcggaagaagactgaggcttgttctttcacagtgaatctataaactatgatttgtgggcagtgtgccccgaggtgaaatgaatgttcaagtgtcctgtttgtggtgattactccaattcggctgcttcattggagtcgcacgctgcttggaagcacggtcgacgcattcgagctgaaaactatcgtgcaccatcgtatgatatgacaccgtcaagtactggtgacgcacttgttggtttggctgtaggatatgctttgtcatcgatgtttgattcatcgagtaatgattacagttcgtcatcatcggattggtccggtggtggcggagactctggaggcggtggcgcttctggggactggtaaaaagttgtaaagatatagtggtatgaagccaatcgaaaggttgcttggacgcgggttcgattcccgccaggtccaccaagaacacatttgatcgccttagcgggctttctctagtcagagcggatcgtccttcggtgtctgacaagatgggaagcgtgggcaagagtaagatgacgtgagcaccacggcaagtgtgttgttgatgggcctgcccaggtttcgacaggcaggtaattagaaacgagcagaccactgttgagagtatccactcaactgaataaagatgcaaactagctaaatgtcgctgctaacgacgccgattactccgtagctcgctacgcctaatcgctcagtcctcgcccctactgagttcctcattggggcccctaatttcattcttcgagagattaaatacgaagaaaaggcacacgaacaatgactgataacgaacaaccaaagcagagaatcaatcctcgcatctacggatggttgtccgatatcatgacctgggtcggagtgctgttccttggtgtcatcctcggcagcgcaatcacgcagtcgattgccatcaaggaccgtgatctgttggtttcatcctacacccagacgatcgcaacaaaggatcagttgattgaatctttgtcggtgacaacggtgaaggctgctgacgttgcactcaatcagagtacgactgaggtaaccaaggcacttgatacaatgtctgagcgcgataagacgctgcgcgacattgagaagcgaattgaaacaaagcagcgccaagatgcagcaaagaaggctgctgaggagcgtaaactgcgaggtctcaaatgagaattctcgtcctgttgttagcacttgttctcgctggatgtaagcacgttcctttggatttgacggaaccgtgttatgtgccacaaaagaccaccgagtcggttgatgaagctgtaaggcttgccaatgaccgtcacgatgctcttgtggagtgtaatgcgaaactagaaaagatcagaacgatcttagacccaaaggccagtcaatgagttttgaaacgtacctgaaagaatcagcagcagctgaggaagcacacaaactgggattgtccgcagccggttatggcctttggcgcgacaagaccggtaaggtggtgaagaagaccgtagatgataaacttgtggacgttcgtggatctgaggcgaacctgaagcatcatcacatcaacattcctcagaaccgtgaaggcaaccatgcagagcacgatcagtcttcggacattgtctctgcacatgagacacctggaacattccgtgaaagcgaagtgaccaagtatcacatcaatgaacactctgcggtacatcctgacaaggctggagagctgcacaacgcattggttggcgcaggctataagcattctccttcagcgtttggtcagatgtatcaaaagggtaagacctcggtgatgatctccaaccgtccagagattagcgcaaagcgcggcggaaagaacgatcatcacagtgttctaattcgtaccgatcatgtggcaaagaagaagcctaagaagtaaacctttgaggatttgattatgagcaggctggaagattttgttatgccggtagggaccgaagagattctcttcattgatggcgagcatcgtgtggtaaagatgaccgtcattgatcgccgtgaagcaggtattaatctgttccacaattttcatatccgtatgttgcaggatgcacatttcatctatggtttgaaaaagaaagaggttctaaagtctcgttggggtcacatgacacctgatgaatcttttgaccttgctcagtcacttagcaggatcgcgctggacctcggtctggtagttggcaatggagtgaggatttaattatgtgcgttgtttcgatgattggtgactcgttccaggatcgttggaaggatcgtcttccgaatgattggaccattccggcaatgccgatgccttcgcagcctatggcacctccgttcaaggagcgccgcattgatgtatcgcatccgttccaggcgatcagtcgcgttgagtttgacctcctgaaaaaggaagtcgaaatcatgaaggaccttctggagcgtgctatcaagtacgacaaggacaacaatgagcctcattgcgagacggagagcaagatcgcattcctcaagcaagtggcaaaggctgttggcgttgaccttgaagaagtcttcggtaaataacaatgaagagcttttttgacgaacagggtagcttcaatgaggacgcccggcagttcacaaaagacgcgcaagagatcctaaggccactaatgcagaaatatgccggcgccggatttagctcgcgtgaaatagtttacctcatttcagatgtggcctcgattgaagagatctacatccgtcaggtaaagagaatcagagataagcgtccttagatcagttggtagatcatctgctcgacacgcagaaggccacaggttcaagtcctgtaggacgcaccaagttttgccttagtagagaatggtatatcgggcttccttaaaagtcgccgtcattgtcggttcgagtccgacctaaggtaccaccttcataagcgcccaggggtgcagagagtttcgctagtatctcgctgcaacgacgtttattgaaggaacatgactagcacagaattcgcctcagtagagaattggtagatcggctccgctcaaaacggagtgtcattgtcggttcgagtccgacctgaggcaccaagatgacaaacgaagaaaagatcgctgcaaaggcagcagaagtagtacactacgaaggagtccttgaacgttacggttcgggtcgctggcttgacatgggtcgccgtcacctggctgaattgaatagggaacttcaagagttacgctctcaaagtattgatggtgatacgccgccctcgtaacgcggataagacagttcgactctgtctgagagcaccaaaacctggctatgtgggtgagcggtttagccgacgtcctcataaggcgtttcacactggttcgaatccagtcatagccaccaattgaaacgagccctgttcattcagggcttttccttggctggtcaggtataagtccttgatactctattgttcatagtgggtgtcctgtattataaccactatagcttgtgggtaaataaaaaccccgtcatattgaggaagtcaggtgtaaggcatgggcagaaaagaaatcaacgtaacaaagagaaacggcaagcgtgagccgtatgacgtggcaaagattcaacgccagatcgaatacgcatgtgatgggattgctaatgtatcgcagtccatgattgaactctcgatgaacctcgagttgtttgacgggatcaagacatctgacattgatgagctggctatccgagcagccgtgaacctgatcctcagcgaagagggtcacaccaactaccaatacgttgcaggtcgtctggcatcatacgctctccgcaaggaagtctatggtcagtatgaagtgccttcgctgttctcgattgtgaagaagaacgtagccaagggcctctactcggatgaactgctgacctggtactcggaagatgagtggaacctcattgagacctttgttgaccacaccaaggatgaacgcttgtctcatgctgcaattcagcagttggtagacaagtatctggttcgcaatcgctccacaaaggaatacgttgagacccctcagattcgatacatcgtagctgcggcaacggcaatgcacgctgagcctgcaaagcagcgcatgaagcgaatcaacgaatactacaagcaggcttccaatggcgaattcaccctcccaactcctgtcctcgccggtcttggcacaccaactaagcagttctcaagctgtgtcctacttcgttctgacgacactctcgactctatcttcgctactggcgagatggtggcaaagtattcggcaaagcgagctggcatcggtctggagatcggtcgtctgcgcccagccggtgcacctatccgcggaggcgagattgctcacacaggcttgaccctcttcatcaagaagtggttcagtgatatgcgtagctgctcgcagggtggcatccgcaattcgtctgcaacactcacctacccgatttggcactacgagtttgaggaacttatcgttctgaagaacaaccagggtacggaagagaatcgtgttcgtcactttgactactcggttgtcacctgcaagtatctatggaatcgtttccgtaatcaggagatgatgaccttcttcgatccgaatgaagtgcctgacctgtacgaagcctactaccgtgatcaggctgagtttgttcgtctctatgagaagtatgagaagcaggatggactgcgcaagcgccagctcaatgcagcagatgccttcggtgcattcctcactgaacgctcagacaccggtcgcatcttcgaggtctacatcgacaacgtgattgatcagggtccggttgattcgcagacttggcctatctatcagtcgaacctgtgtcaggaaatcttgctgcctacgcgtccgttccagcgtttggaagatgaagaaggtcgtatcgctctctgcactctgggttcgatcgtgctgggtaagttcaagaagcctcaggatatgcgcggtgcctgtcgtactctggttcgcagcctcgacaacttgctgtcctatcagatcttcctgtcgccacaggctgcgaatgcaaatgaagacttccgtcctctgggcattggcatcactgacctggcacactggcacgctcaacgtggttatacctacggtcagcctgaagcacttgctgagtttgctaagtggatggaacacattcactactactgcatcgaggcttcgattgaactagccgaagagcgtggaccgtgtaaggaatggaagaacacttcgtatgcagaaggcattctgcctatcgacaagcgttcgcctaacctggatgaagttcacaagattgagctgactctggacttcgacgctctacgtgagcgtgttaaagtttcaggcatccgtaatggcctccttcaggcaacggctccagttgaaagctcgtcggttgtggttgattcgtcgaatggtatggctctgcctaaggcactgatctctaccaaggaatccaagggtagctcgctcgtacaggttgtcccggaatacgagaagctcaaggatcgatatgaaccgcttctcatgtggaatcagcgagactgtgttggatacctgatgacggcagctgtgaatcaggcgttcacagatcaggcactgagtacagacaccttctacaatcctgcgttctttgaaggcaacaagattccggcaacattggttgctaagaacatcatgaacttccatcgctggggcggaaagactttgtactacagtctgatgaacaagcgcggatcgaaggatggtctggaggaagtgaaggtagaaacagtcgttgaggaggtcattgcagatggagaagactgcccagcatgtactctctgagatcgattggtctacagtaagcattggatgtcctattccaggtggcgcacgcccctggactcaggaggaaagagataggcttcaagaggcgatgaaacagatcatcgcccgcgaggcagaaatgagagctcgtggagagattgaatgagtcagtttgatatcagtacagaaaccaactaccttgaccgcaagatgttcctggatggtactgttaccatgcagcgcttcgacaaggtgaagtatccgaagatccagcagtatgagaaagtccagcgtggattcttctgggtgcctgaggaaatcgacgtcaccaaggaccgtcaggacatgaaggctgcatctccggcaggtcgacatgccttcaccagcaacttgctgcgacagacgacgcttgacagtgaacaaggacgcgcaccgctgcagattttcggaccggttgtgtctcttcctgaaatggaagccctcctgtctatctggggcttctttgagacaaacctgcactccaacagctacagccatatcatccgcggtgtctatccgaacccaggcgaaatctttgatcaggttcatcagaaccaggagatcattgatatggcagcaagcattggtcgctactacggacgccttgatgacttgaacgttcgtaaggcgcgcggtgagaatgtagacatcatcgagcacaagaaggcgatctggatggctctgcacgcatcctacgcgctggaagcaattcgcttcatggtgagcttcgccacgtccttcgcaatgatggagaacaagctcttcatcggcaacggtacgatcatcggaatgatcctgcaggacgagcttctgcataaggaatggactgcctacatcctgaatcaggtgtgcaaggaagatcctgacttcgcaatgatccgcgatgaaatggcggaagaagtctatgcgatgtatgaagaggtcatccaggaagaaaagaactgggctgtgtatctcttcaaggaaggtccaatcattggcctcaacgtgaagatcctccactactttgtagactggactgctaaggaatgtctcgaggcggttggcatcaagtaccgtggtgaggctcctaagtcgcatccgattccgtggttcttgaagcatgtgaagcaggagacgaagcagactgctctgcaggaactggaatccaccgactatgtgatcggatcactgacgagcactattgactatggcgacctgcccgtactgtaagaaggaagcaacactcgagacgggagaaacgatctacccacaccgacctgacctctacacgctctacttctgggcgtgtttgaaatgtaaggcttgggtaggttgtcatggaacgtctcagataccaatgggaagactggccaatgccgcttcccgtaagctaaagtccaaggcacatagcttcttcgatcccatctggaaaactggctacatgacacgcacacgcgcgtatgcttggcttcaaggaatgacagggctctcagcagatgactgtcacatgggaatgatggatgatgaaatgctgaggaaggtggcaaagatgtgcagacaatttttacttgaaacaggaattagaaacgatgtatgagatctactcgaaggacgcttgtccgaactgtgtcaccgctgcctcactcgcagagtcaaagggcattgaattcaaagtcttgaagttggacaaagactacacccgtgaagacctcttctcgaaggccccttcggctcgggctgttcctcaggtctttaaggatggtgtcctgattggtgatctggcggcgtttcgtcagcaccttgtaagtgtctgattcttggaaaactgacccgaactgactctgttagagtcagaaattgactcgttcttaacatctgcgccgtttggttcagattggactaagaacgggtcaatttcttgtcagagcctcgtgaagagagcctcagaacccttgatacgtctagcaatgaaaaagaaatgaagattcaggttgtgccttaacgctaccttcattaacattcgattgtggtcagcgacagggctcagaaaggccagtcggactgatcgaggggttccaacatggggacaacatgaagacacagaaagacgcgatcaggcgcgagctgttagatcgtgcgacaggtaaaggtagagagccgacgtgggacttggacgtcgagccgaccaaactggaactggtcaaagcactcaacttctactcggcaatttcgacgccggagacactcaagaaatatgctattacgtgggcgagaaagaacgccccggaacgccttggggtcgtagaagcccaacccgatttcaagttccagactttcggtgcgcttatgcgtattgaaagccgcggaatgaagcttccaaaggcagagaagaattcgattgcgaaatttgtgaacgaacttaatatgcctttcaccgaaccgaaacaaattaagccgaggaagaaaaagatgtcgaccgaaaacgtgaactaccgcaacttctgcgacgccctggacaaggccaccgaagcgacggagttcgtcaagcccgatctgaccgttgatccgaaacattcgacggcgtcggtgatcgaaacctgtcagcgcgagctggaagcgatcaaggaagacggcgacatctatccgaagcacatgacgcagtggttcacctacgtcatgaagctgatgaacggcggcaagctgccggaaaaggcgccgaaggaagtcaagaagcgggtcgaaactgtcgtgaacgacaactccgacgacggtgatgacgattcgactccgactcgtcaggcgcgcgccccgcgcactccgaagaaggtcgcgtctgccaagggtcccaagaccccgactctcccgaagaacgatccggtgccggctgctgaccacgttctcaacggaaagaaggtcgctttcctcttcgacactcgctacggtcgcctgacccggatggtctcggattcgaagaacggcttcgagatcaagggcaagaccatccacaacatcgaccactccaagtcgaaggtcgctctgctcaagaacttcggcgacgcgatgcagcccggcaagaacacgaccgacgaactggtcggctggatgggcaagtgcgtcaagaagggcaacccgatctcggtgggcagccgactggcagaagaagtcctggtcctggaagccgcctaaggcacaacggccctagggagaaatctctagggctttttcattggtcggagatcgtaatgagccgttgttcctgcaagaccacgacgcgcgaaatgacctactcggagttcgttgcctgggcacacgagtatgtcactgagagatttcttgtcggtggcctcaaggctatgcgcgacgcgatggaaatcgtcgtccagcagcagtccatgaaccattcattcaacaagggaagcttcccgaaggcggacaaatgagcatccgtagttggtggaagaaaaacgtcaccgaaccccgtcgtcggaagaagttctttagcctgcgagcccggcatggctcgtctactcgttatcacttcctgatggtcaaggaagctctcgaagacctcctgtaccgtttggattccaccggaactgtgtctcaccccgaagccggaatctgtttcaacgcaggcttccagattggtggggattggcgtgatgccggtgagaccttcctcagtctggcagaaatgttcaatgcagaggtccgaggcatcaagaaaaagttcacgttcttcaccgacaatttcccgttcgaagacgtcgacgccctcgatgggttttctctgaacaagtgggttggtgagtccctgaaggtccggcgtgcctgtatcgaatggatcctcgacaacatcgagaagcatcaactgcaccggggttaaatatctcgacacatcaatcgagaacgaaacgtggccaaggtaccctacgacaaggcgaagaaaattctgaccactctgtaccaaacgggaggacaggtttctcgtgatccggtaggtcagaccacgccaccgaagggatcaaccgtaccgaagtccgtcatccaagcggcaacgccagaaaacaatctgagggtgacgaagcagccacgcaggaatgtgatcatcatcacacccttcatggcggaagatccggctttggcagagaagatgaagaggtacgctgctcgagcgactaaggactcgttgaataagaacgaagccccgctcgcatcacacctgttctactactcagtcttgaacgaaaaggatccgattgaacgagacattggcctccaatctcagctgagttggctcaaggttgcagacgtggtagccgtgtatgtagacttctccgtaacacctgcaatgaaagtggcgatcgacaacgctcgcctcctacagaaaaagatcgaattccgaacaattggagcagtggcatgagtcgtgattacaccaacttcccgcatcgcgcaggcgatgtctatcgactgggtgagtcgaacctgtactacatcctgtccattgtcgaaggcgactcggtcaatgacgactggctcaagtatgccctgatcagcctcgacggcaaccgttggtgcgagcctatcgcacttgaccgttctaatgaacgccctgctgacggtctgacggaagaagagttcaccgcccttgtcagcgcagaggaccgagaagctttcgtcaaggcttcgggcaggctggtcttcgcctcgctccactgacagtccaattcggaccaatgctggccaatactagcatgtgaaggtcagcgtgaaatctgacagtctccacagccctatgaccgtcagacttgttcagatttcaccgggtctgacgtaagtgtctgattctattggggttctggttttgaaggggtaccacgtaagtgtctgattctattggggtcgtcacacatgaaggtagcgtttacagctcgtgacgggctgacaacgaaactttaacgagtctcttcacaagacccggagttctgatacagtgtctgacaatgatgtagagaggacgtgatcacctgtagcatgagtcttgtcctattccggactctgttgaggaaatatcatggctctttatgcaatcaagcacatccctaccaatcgcttctacactccaaacacttcgggtgctttccgcaccggacgcaactggagaaagggaaaaggtgtattgtttacggacaaggctgacgcggtgaatgaagtggtaagcctgatcaacaagcatcgtaacggtgaagagcagcttcgcattcgtacctatggcggatacgatgttgcacgcgccgaggatgcagttggtgatggatacattcgtgatcgcgatttcagcgtagttgacgtgaacgtttaagtttcctccgtgtggcgcactggccaaggatggccacctattctattccttgagaacacgatgacaattctttcgatcctcaatcaactggctgcgacttcgagccgcctggccaaagatgcaattctcaaggacaacgcgtccaatgagacgctcaagcgagtgttcaagctcgcatacgacaagaagatcctcttctggactcgtactatcccagatgaagccagctggtctgacgatcctcccttcatcaatcttgacggtgcacttgaccagatcgagaagaacatctgcacacgcaaattcacaggcaatgcagctgctggcttcctggcaagcatgttctcccagctcgatcgcgacgatgcaacggttctcaagcgagtcatcctgggtgacctgcgtgtcggcggaactcgcgaaacggcaaaccgttgctggcctggcctgatcgcaaagccttccttcatgctctgctcggcagactacgacgaagaagagatcggcttcccggcgatcagtcagaccaaggaagatggcgcccgttgtcgtctggaatgggatggcgagaccgcaaccctgaccagccgtgcagacaacgaaattacgcatcatgcgacgttcaacgattgggcgtcaaagcacctacagcccggcgatagcctagacggtgagctggtgtgtttccgtgacggtaagcgtttgagtcgtaaggactccaacggctttgtgaacaaggccatcaagggcaccatcagtcctgaggaagcagaaatgctgaccctggttgcatgggaccttgaagacaagactctgccctacaacgagcgtttcgccaaggtccagtctttcgaaggcaaggtgcaagcgatcgagtctcgtatcgtccattcgtatgaagaagctctggctcacttcaaggaagctcgtcgcgctggtctggaaggcaccatcctgaagaagtatgatgctctgtgggaaggcaagcgtgtcaagttccaggcaaagttcaaggctgagatcgaagcagaattccgtgtcgttggctttgactatggcaagaaggggaccaagaacgagaagcgagttggcgcactcaaggtccagtccgaatgtgggcaggttgcatgtgacgttggcatcttcaaggacttccctgacacgatccgcgatgacatgctgacggatctgccgaccatcatcactgtgcgatacaacgagcgcatcacgtctcgtggtcgcgatacgcagtctctgttcctgccgcgcatgatttcgattcgcctggacaagaacactgctgacaccctggatgacctgatcaagatcgaagcggcaactctggaatgattgagtcttccgtacagacaagagaaggcgatactatcggtttcgcctatgagattcgtcacggtgaggatttcgatcctcgctgtggcgtgtgtacccagtacacggaatacgtgaacaagattctcggcgagtggctgcctgaggcattcatcgttgaggcagattggttgaacacgaatagttcttccggtctcaacatgcgcaagatgttgatcatcaagagtggtcctgagccggttctggaacgacttctgttctggctcactaccaactttgatgagaccatcaaactcgcatcaattgattcgattgtgttccgtgaactaagcacacagaatgagtactcctataccattcagtattgacgctgtaacccatcaaccaatggagtcgtaatgagcattacctttgagcagtttgaaaagcagattgaacccatccacagcgcttattgtgccaagtacaatgagcttgctgttctgcgacgcgagttccagaagctggcaaatcagatcagcctcgacaatgtcgaagatgaagatgagcgcgatgacctgcatgaagaagtaagcgaccgtcttgccgacctgacctacgatttcgatctgcaatgggatggtttcgagcagggtaacatcaacttctgggttccgagtacttgctaatgaccactgaaaccaaaacctcttttgaagcgttccatgaacaagccacggacctctatagccgcctggccttgatcgatcagctgttcaaggaagctgatgctcttgtcaggaacgtcgatcgttcttcattcactgacgagcagctcgatgaagcctatgaattggctcatgaaattggatacgctgccggctggcagtttgacagtttcggtgaaaatggcggctactggcagccttcgacctgctaatcattcaaccaaaggaaatgacaatgagcaatcttgatcttgtgaacgccgccattgaagccggcaagcccctgtacgacgaatactacaagctgcgcaacgttgcagaccagaagctgcaggaaatcctgggtctggtagagtctctcaagctggaccctgaggacaaggatgatgaagaagagatcatcgagatcatcactgacctgggtagccgctttggtcatgcgtgggaaggtcattgggacgtcggcggtcaatgggacgttggtgacgaaatccagtactgggaaccgagcacctgctaatgagcaagaatgaagaattgatgaaggaactctatgagcggacaaaaccgctcaggaaagagtttgacacactcaagttcgctctggataagaagcgttatgagatcgcaggtctcatcaacactctcgaattcgaggagatctctgaggatgatgaagaagcctacgagtctctgattgacaacatcgacagcttcatgagttccttggacttgacttggactggcggacgctatttcgagtggggcgacaaggattggaacccaggcgaagaaattcattactgggaaccgagtaactgctgatgcacgtaatcaaggcacctgttcgtattcgcggtctaccgcagcgaccaactgtctttctggctgggtccattgatatgggctcagctgttgaatggcagactcgccttgagcgcgaactagaatacttcccaggcacgatctacaatcctcgtcgtgatgactgggacagttcgtggcagcagacagatagtgatcctcagttccgaagccaggttgattgggagcttgatttcattgagcactccaaccatgttttcatgttcatctctaaggacagcaaggctccgatttctcttttggagtttggctacatcgttggtggtgaacagaacccggacaagctattcatctgtgtcgaggaaggcttctatcgccgcggtaatattgaagttgtctgtcgtagacaagacatcaagctatacagtaacctcgacgaggcaatcgaggcattcaaaatcaaactggcaagtgatctatgactgaattgttctatccctcgaatctctccaagcctatgcctgtattccttggcggtagcactgcaaagggcaactggcagaagaaggttgtggctgcattcgaagacacgcatattcccttcatcaacaccagtcgccctgattgggacgtcgttgaaccgaaccgtgaacaaaagaacgaacacattgcgtgggaattcaattggcagaagcgagtgctcaatcacttcatctgcatcccagcagatgcgaagtctcctacagtgatgctggaactgggacttgcgatttcgtgtcatggtaacgctgtggtgttcattgatccggagtactcgcatttccacaatgctcgtatcgcttgtgagacctatggtgttcgtgtgttcaccgacttcgatgaagcggtagaaaagttaaaggacttgttcctaacttctcgcctattctgagaaaaacggcataaatactcatatgaaaacaattctcctcacatcgaaaaattggcatcaggttgcagctctagctgtcaagcccgccgacgaacgatatgtggctggatttgatttgaatactgggtacggaatgagttgaaagattgattttcaacttggctttctggacccaggaactgaaaagtttctgggtttttacttagtggtgcgaaaaggttgataagaaaggctgtccatgtagtatatggtttcaggacttttaaacattgacgcgccgaggagcttatgtgaagaacttgtacttgacggtaacaaactttctgttaggctttggcacgttgcagccgttttgggcgacgagttacctactgatgaagttaggaaccgtttcaggaaacatgtaagaaaaggttgtgtagaaaacagtttgatgtaaactacgcaacatgaagtaacaggcgcgcagcaacgaagctgacgcgacgttctttaaaaacaaagattcaagttatacgtcgttagttcaattggcagaacaccagcctccaaagctgggtgttgagggttcgagtccttcacggcgtgccaagttttatgtctgggtagcaaaacggcaaatgcgctggcctgcaaagccatgaggtgcgagttcgattctcgcctcagactccaagttttatatctgtgtgtagctcagtctggttagagtactcgctttggaagcgagtggtcgttggttcgaatccaaccacgcagaccaagttttatcccgttgtatccccagacgctacgaacgtctacaaaggtaactggagtggcgccaaaaagcgctgatgcaggttcgaatcctgtcgacgggtccaaacagttctcggacttaaaccgagtggtggaggatgaactgagaaatcagtgaatcccttgacgagatggagtcattaactcgatcgagaattttgggctgctcgtataatgagtattacacctgccttgcacgcagggaatcggagtttgattctccggcggtccaccaaaacttggggccttagctcagatgggagagcgggtgctttgcaagcatcaggtcatcggttcgatcccgataggctccaccaagtttagatatgccctgttggtggaattggtagacacgcatccttgaggtggatgtgctgaaaggcgtgagggttcgagtcccttgcagggtaccaaacaagactgttcaatcagtcgaacgagttggaaggtcgggttcgaatcccggagtgatgacgtccggattaggtcatcatttggtgtagtgggcagcacgccgatacattaaaaggttgcgcagaagtgtgcttcatttagactgtgaacacagtcaggcaagtcgatcaaaagacgcgccgacaagcccgaagcgagttcttcggctaagaaggaaagacatcgtttcctacttgtaacgacaagtccttagaggatgaagtctccgttagtcggacgcctgagagtggcgaaaaggattcttcggtatttcgggttgcaagcattaaggtgatgcaggaggcttttaaccttcagaacagggatcgttaccctggcgacccaccaagttttaagccccgttggctcaattggcagagcagctgttttgtaatcagcaggttgggagttcgagtctctcacggggcaccaagttttaagcgggtgtggtatagtggttgtgccctagccttccaagctagagagacgagttcgatcctcgttacccgctccaagttttacgatgcatctgtctgctaattggaataggcaacgatcctttcaagttcgggaatgcgggttcgagtcccgtcagatgctccaagttttgctccactcgtctagtggctaggatgacaccctttcaaggtgtagaagagggatcgaaaccctcgtggagtgccaaattatgcgcctatagcacaactggatagtgcatccgaattctagtcggatggttgtgggttcgaatcctactgggcgcgccaagtttcaaatggataggtgggcgagtggtttatgccagcagactgtaaatctgccgcttaattgcatcgttggttcgaatccaaccctatccaccaagtttatgtgtctgctgtcgggttggaggacggcaccgggctgtaaccccggatcctcaaaagggacgtagtaggttcgaatcctaccaggcacaccaagttatatggttccttagctcagcggtagagcaacgcttttacaaggcgaaggtcgtgggttcaaatccctcaggaactaccaaacgttgaaacaggttgtgtagaaaacagcttggtatacaataagcaacatgaagtaaggtccagaccactgaagagtcgccgggacgataaacaaaggcacgaaacgtcgagaggcacaaaacattagcctcgtgagacgtctggtctagcaactcaattgtcgaaaggcaattgtttaggaatacggtacagtgatgtgcctaatggattaaacgcccacaagcggtccgccagagatggttcctctagaacaagtcgacatagtgcagccgaaaggttggcgtctagtatccctaggcgatatgtggaggctcagtgagacacgagattcaggtccaatgccgaatggtgaggatttgatcgtttagcgacggtagtgtttcggcttagcggcaactgactccaaggacattgaatcggtaggtacgtagttcaagccttagcgggtaagggcgagtatcaggtcaggcggactaatgttcgcactgtatcactcggacgtaggcttagcggctgaaacgagaggaggtcgggtaagaagctgtcgcccaaaaggctatggacttacgaacctgctcgaccttagtgggctttcaactttgacggttaatcaaaactacgaaaaacgcaaagtcaggttcggtcgtaagtgaaagtggcttaatcgttgacacgaaagtgaatcaacgcaatttgaggctcgcaaggctgaggattgtctatcaggaagtgcacctaagaggaagcccctctgaatggctcgcaaggtcaagggaaacgggaaggtagagtagcttacgatgacagaggaaacgccacctctttaaactaggcagccatgacggttaacaatgatgcatcgaaagatggttgttgtggaaaagttgggaagggctccgcaagagctgataatccaaacgaatgaatcgtctcgtcagactgtattctcaggtcgacactttgtttcaaggagttgtattcctcaaacgcttcaattgaagtttttgcgaaatgcaatttttggtcccatagtttacgattggttagaactcccgcctctcaagcggaagaatcgggttcgactcccgatgggactgccaagtttgccgaagtagcacagagaaggtgcggtgctcgtggagagcaacggtcggtggttcaagtccatccttcggcgccagatttatacgcgtgtagctcagtggcgacgataagttcaaagacggtaggcatactgtcacgcagagcgagtcgaggattggcgatacgactgtgacgatacgaaggtggagctcgagatcctagctccgacaataacggtacggtcaacattcgagagcgccgggtagataacccggaggtcagtggttcgattccattttcgcgtaccatataagtagagtagtacaaaagttttatccgggtttagctcagtctggtagagcacgccgtttggggcggtgaggtcgtaggttcgaaccctgcaacccggaccaattagagaagtgttatggaaactttagaaacgaaagtgacacgtctaggcaatgggctttatggatgcaggatcatcaggtcagctgacaagaagccaattgttgaattaagagttgaaaagtctcagattaggaacgctatgtttgacatgctccgaactctagacaagctgggatatgatagtcctatggcacacgcttcgcgacatcgcggtaaggcttgtgtcacagactcgaaatatatctggcattgatttattctggacgcgcctaatggggaggcaccgggctgttaacccggcgatagaaatatccgacacggttcgattccgtggtccagagccaaatatggattacaggccaactggtgtaggcatgcagctgttaactgcagattgttgagttcgattctcaagtagtcctccaaaacaaacggtctattagtctatgggttaagatactggcctgtcacgccggtgtaacgagttcgagcctcgtatagaccgccatagttaaaacgagcatgggtctgctgggtgaagattttgcgttgtcagcgcaaagatgatgggttcgaatcccatatgctcgaccaaattaagaatgatgcgcggtcgtataacggcagtatactgggctcataacccggagatggaggttcgattcctccctgcgctaccaatcaacgggtccgaagctcaaatggcagagcaactggttcttacccagtaggaagtcggttcgatcccgaccggacccaccaaacaatggactcgttcccgtagttggtcgaacggagcggactcttaatccgacggcgaaagcccatcgcaggttcgaatcctgccgggtccaccaaaatgagatagatatgccgaagtacaatttcaagtgtagcgaatgtgagcaccgcggtgatgtctggaccggcgatactgaaaaggtcgacgtggactacaaagacgtagagtgccctggttgtggaaaaaagacctacaactatgctccttgggattcaggtgcttcatctcagtcatggggtcatgtgaagcctacaacactaggcagacagaaggctcctcaggattttagaaacttcctgacacagattaagaaggcacatccaggttcaacaatccgagatcattaatcgaaaaggtgttgtgatgtacgtgtatcaaacatattatgtgtacaccgagagattttgtcacccagacccacttgagtgggaagaaattcgtaaagtgatttgtactacgttggatgagagcttggcgcaagaagttgctgacgctcacaacaaggaacacaacaagatttcaggttacaaagactacgccaccgttgcatgttatgcgttggcaagtcgataaagaatcgccgttcagtagctcagttggtagagcgcccgccacgtagcgcgggaggtcgtgggttcgagacccacttgggcattaaggcgctagggcgaatttaaagtactcacatactagttcgagacagtatcgcccggatcctataattgtcagcaggtaatggtcatgcagaagaaaattgacgtgaaagcagtcgaggcgttcatgcagacgcagagccctgagacaaaagtttatcttggagcagactccgagaaggtaaaaatcaatggtaagatgtacgcggattacaccgtcgtcatcgttgttcacattgatggttgcaagggttgtaaggtattcgccgagacaactcgtgaggaagactacgataaggatccttcaaagccgttcactcggatgatgaaggaagctgaaaaggtagccgagcttcacgatcgtttcaaggacaccttctacgacttcgaggttagtattcacctcgacatcaacccgaagaagacggcaggttcaagtatcgcaatggaagcggcacgtggttacgtcaaggcgatgaccatggttgatcctcacttgaagcctgtggcatttgctggttcttatgctgcggatcgcgctaaagaacttggtatgtgctgaagatatgcccctgtaggcgaattggtatagctactggccttagaagccagcgccgaaaggcattgacggttcgagtccgtccaggggtaccaaatatgtgtcggagtagctcagttggtagagcggtagcttgaaaagttacgcgtcgcaggttcgattcctgtctccgataccaaaaacaccgtcactcaggtccctcggtgcaaaataagggaatactcaggagaggagattgtagtatgaagttaccttcgcgttttcaaatcggtgataaggttctcgctggtcgtcttgatggcgggagcaaaggtgaagtaattggtgtacacttcaaccgatacaaagtatcgtatgatgtggtcgacgagttgacccaacgtacaaagaagcacctcagtgaacgggttcatcctgtcacagagtaaatacagatataagacaatttgcatcgttagctgagatggattagcgcttgcctgaagagctcgagaggttggttcgataccaacacgatgcaccaaacaaaggaacgtgaatgagctttaagccggttaatactttcgtcatcgtaaagcgtagggaagaagatacaacgagtcagggaggcatcatcatctctggatcagttgatcataacctcttcactgttgtggccaagaatgatcttgtgacattcgttgagcccggtgatacggtagtaatcaacattcgcgaagcagctgaaatcgacgatgtgcattacgcagttgatgcaaagcacatcttcaccaaggttgctaagtaagacagttttgcccaggtgacggaattggtatacgtactgtcctcagaaggcaggttttgagggttcgagtccctctctgggtaccaaagtttcagtgttccacgtgtcggaattggtagacgagccagactgtgaatctggagtttgcgggttcgagccccgtcgtggtccccaaagttgatcaggtgattcgccaccttagagtgcgaaattgaaatattgcctgttagctcagtggtagagcaatcgcccgataagcgataggtcgtcagttcgatcctgacacgggcaaccaataagccttcatagctcaaaggtagagcactcgcccgataagcgatagacctaggatcgttacctagtgaaggcaccaaaccgttgacgaaacagcgtaagggcgctaaagtagtacgcaacaaggtattctagttggagccttgcaaagagccggactgttaaaggttgcggcgagactagattggtagcttaattagcttacggtgcatcatatgttgctagggtatgatgactcagaagccttcgggaacccttaacttagctacaaattctatagcccagtcgtttagttggtccaagacgccgtcctttgaagtcggtcatcgtaggttcgaatcctacctgggttgccaagtttgatgcctcttagttcaatggtagaatgtcgctctctgaaagcgaagacaacggatcgataccgttagaggctgccaaatatgggactgtgccggatagctcccggacattatgatgttagtatgcagaatcaaagcactgtggacaggtaccgggacctttgtgatgattcttcagaacgttgattgatgcaggtcccgccagatgcaaaagtaagactagccgttcaagtcggtaagcacatggtgtgcaccatgccgcgttaggtgtggaggaggcgttcgaatcgtcggtggttgccaggcccctatagacactgcttgcaagagggatttaaagtaaccaaatgaggtcgctcctcgcggaacagttccctcggtactattctatgaaggttgtagctcaaaggtagagcgccgggtgtcggacccgggtcaaagagtatgaagttcgcgcgaactgtctgctcaggtgcaggagtcgaagcctgtcagccttcccactaattgataatgagagacgatgagacagttcaaccttcgtggtaagaagacatatcgtcctggctgtggttgttgcgttgttgaaaacttcaagccagaaatcattgacaagattcacgcatacgaaatgcgtaatccagatgaattcgctctcacagcagacgatttcgattgtgtagaagattttctcatttatattgatgttcccgttgaccaagtttgttatgatagttcacactgcgctcccttcaaaggcaaggaagaaagccaagaagaaggttgtaccgacaaggacgccagttaagaagttcgttgaaaagaaacgacagttcattcccaagatccccgtttaccgtgcagcaggaaccgagcacatccgatcacatggattggagaaggtgccgcctaaactggaacgtccaatcgtgtatcatggcgatatggctgaacgtgaagcggctgctcaagatcaaattgagtaccgtgagcatttggttagaaacgctttccgtaacgggaaggtatcggcatgctacatttcaggatgacctatgaatactgtgattgaaaagactgacaagggtgtgatcaaaggcgcggtgttcatcgtcgccggcgataggcattgggttgagggtaatgtctacggcaaccccaacttcaaggatggcacctatatccacacgtccaagattgttgcagttcgtggacgccgcattgaaaccctgaactcgttctacacttgcgagttccacgttgatggacctgttcgcctatggtaacccaagttcgtattctgattgatgagtgtggtgcacctctggattccattgttgaagtgactgaaatcttggatgatggtcacatcatgtatacctgggaagacatcaccttcatggcttcaccggaagcctgggcattgcattatccggattctgcatatggatatgattctcagagcgctggcacagacatcaactacgagattttgagaaacgccgctgagcaattcctggtgtttgttgaggaagaaaaactcgacgaagccgccattgattacttctacgacgtgttcaaggaaactctcggtaagtagaaatattggagcgtaactcagccaggtggctgacgctgtttgctaaacagttgggaccttatgaacaggtctggggatcgagacctctgcgctccgccaatttggatttgatcatgaaaatcgtgctgcttgatcttgaagaaactgtgatcgataactgggacaacatgaaccttctcctgggaaacctggaaaagattcgatggtcgattagccaaaccgattgtaagctggggttgatgtcctgggctgtatggcatgacgaggacaaggctaccttcaagaagcgtttgcaaggtccactcgaagaagtgcttggtaagacgttcgatgatgagttgatattctccatgcgcgacttctcagacatcatccttgcgcgccgcaagaaatggcttagccgtgacgatatgtttgagctattcggcaaggaagaatgtctactccaactgctgaggcttgaacacttcggaaagaatgcccgtgttactctgatcgatgatgtggttgaccataatatggagttcacaagaggcaatgccaaggtgcgtttcatcaacgtgaccaatcctcagtacaagcattggaatatcaatgacactgtccatgactatggcagttggagagaatgatggaagaacttgctcctcagaaaggcaatatgcctgacagcttcatcctcgttcgtacatctgcaggcgttcatgtgcttggtggttggagcggtggctatctctacggcgatagctggcgtctcagcactgcattgaagcgcgtagttgagtacgatggtgattgggtagttgttgaaacaagatcaggttcgacctatgccctaccgacacaagcatccattcgccgttatactttgactgtgacgacttcgggcgtgtttaactcgttcgaccgtcaggcaaaggaacaaggaatcctctttgaagcgattccggaatccgaattcaacgatgtaatcaaccaactggaaaattgatcatgagcaatgctaagctgcaacgtctggaagaagagctgtatgaaaagctgcgcgagattcaggatgtcgctgtagagacgaacaccccgttctctttctccatcaactaccatacctatgatgtgttcctaccggatcatgaagatgaagacatggtagaatatctgaaggaagaagttggtgttgaagttggtgattgggtcagctctagcgatcgttgctaatgagcattgacactgacctctatgagttggtggaaggtagaccagacgcagcttccatgctcgtctgggctgcatcactgctcgggctaaacgccgttcctgagtccgaagaagttgaagctgcaattggtatctttgaggatgctcgagagaatatcatcgagaagcgtgctaaggatcgtctgaccgatatcgttcgctacattgtcccttcccagtatgatactaaatgggacaggcgaacgtcgaagcatcctgacattcctcgtaattggtggaatggtgctttcgtcaaaacgttcggatggaccaaagacagcttcattgtcgaagttagctcctacgtcggcaacaacgagtatgatgggacaacgattgagattccccaacatctcgctgacgtaaagaacttcaattggaacctgcaagataagattcctcttattgacgcattcctaaaagcagccaaccgctaaatatcacgtaaggattgttaaccaaccggggagttggcaccgcttcgaaagcggtaggtgcccgaaagggcatggggatcgagacctcagcaatccgccaaacaatggacagtaaactagccggggagctagcgccgacttgaaatcggtaggcacgtaatggtgtggggatcgagacctctgctgtccgccaaattaaaggatgatcatgagtcgtttgaagtatgatgaagtgccgtatcagaaaatcaatccaggtgatcgttgtatcgtaatgaccacttgtactgggcgctcttcaatgtggtcagcaacctacttgggtcagcgaaaaggtcggtgcgttgtagatattgatgattaccaccgtcgccttgttgatcaaaacgatgtagagtatgattggcgcgccgagagtcgagagatcaagtacccaccctacaaccgagccacatacgccgaagatcaagctgcataccgagctaagatcgaagagcgccgtaagggttacgactacaagaagttctactatgtgcgtcgctcgactctgcagaacaacaatgtctatcctgcggatatggcactgaaagatttcaagctgtaaatagaacatatggacagtaatctggcttggtagtcagcaccgcttggaaagcggttggtaccgaaaggtatgggattcgatttctctgctgtccgccaaataaggcgaacgatgatttacgttgtatttgatgatacgtatcgcggtgcacacaaaccatttcattcaattgaggcaactcaagaggatgcagatagggtggtgcatgatttgagagaaacaagcacatcaacatgtgcaagaacactgatcaaatggaaggcatttgagtttggtcagacgtttgaactacctaagcccttatagcacagtggcagtgcacctcattggtaatgaggaggtcgtcggttcgatcccgactaagggcaccaaataaaggaaatggatatgactgatacgacaagcttcaccgctgttggcgaaggttaaaaatctgcgggtataattcagtctggtagaatgcttgcttgccatgcaagtcgtcgcgagttcgaatctcgctgcccgctccaagatgtcaaaagccagggctttaatcggtcctggctttttctttggttgaatagaaacagtctacctataggataaagcaatgaacagacacgacgtgaaagaccagctcgaagacctgtggttcgatgtgcgccattggttcaagaatctccgcctggaaatcgacacccgaatcaacccacgccagaagtggttgacgaaagaaatcggtcgccgtttcgtcgacaaagactacatcatcgagacgaccatcttcgaaagcatgatccacttctgggaagaggacgatggagaaaggtcgacccgctaccagttcgagcactacgaaggaccgtgtggtggcaaggcgctcaagcccgaagaccaagaagcctacgtataccgacgtaagctgtacgctgacctggacaagtgctaccgttgggctaagacgcgtaagggcttctgggcagactgctacaccaactacaagccggaaaacgagaaaaaactcgaagccgaagacacgtactatatgaacgaaatcatccgtctccgtaagcacatgtggacctaaatgtacggaatccctgagaactaccggcgggtggcagaatctttctatcgcccgcatggttgcaccttagatttttctcaaaaggcattgctgcaagctttcgagaaagaaacctacggcgttgaccacgacatgtcgaagaacggctgggcttttggcaagaaagccttcgacatcacaatcgcaagttggcgcgaagatcttgcagatggtcttttctgcaagtatgactacctccgagactatgaagaagattcgttcgagtatgagttcatctggaacgtgatcaagaatttttcttcggcaaggctgttcacttactgatcttgttctatccaggcatcctgcatatcataattgtgtagcacttatacacctttgaggaaatgataatgagcaacgaagtttgcgtgaagttcccggcgcacctggtgcagaccgtccacgacggctacctgtacgatcgtaattcgcgccagctgttctcgttcaagtctggcaagttgaagccgatcaagcaggtcggttgctaccaggcaaagaagtcgtacggtgaagatggctgggctgtctccgtcagcggtaagaagaagttcatggccaagaaggagctccagtcgctgtatcctacggagtatcaggttccgtttgcatgagcttcgttatcctctactgggcaggtgtcatcgtcaccggtggtgcctgcattttcggactctaccagatttggaagacgaagacctacacgccaatcggtttcgagcatgatgcaccagcgacgctgggttctttccttctccggatcttcctggcaatgctcgccacctttgtaccaatcatcaatgcctcactcgccatcatgattgtattcttggcagcctacatcgcgatcgcggaaaagtttggtgacaggattctcaaagtccttcggagacctctgtgatagcagctttcatcatcttcatgcttttctatggcggtcctgccttgattgttggaattcccggattcctcaatgttcgggcgatgatcaaggacaaggtgttccgagactggatcgaccattacgaaaaacggacaactcgtggtgatgttctggggagagcctcccttcttgttcttttgactttcttgccagttttcaacattggctttgcacttttcgttgtaataggatggcttcacgctgcctggtacaaattcttcggtgaatggtcaaggacacctgtataatggaagcgattatctttctgattgtctacctcatctcgattccgtttcctgcctatatggcttggaaagaagttgatgaggtccgcacatcaaagcgaatcaaaggcatccataacttcttctatcgcgatgccacgcggtgggatttgatctggacaggcatatggtgtggctttgttgcgatgctgccactggtcaacactgcgctcaccattggtggagctttggtttggatctttgagaagctttgggcaaccaaattcattgcatggatgaaaactccgctatgagcatgaacacaattccaacggaactgatcgcggttccgaattacgatggctacttctggcatccgggcgaagagcagttgtactcgctcaaggtgaccggaacgcttaagccgatgaagtatcatggtgcgagatatgtgccaaagctgtatcggcaaattcctgcatcgtattccgtatcgcgtgctggcaagaaatcaattctgaccaaggaaacgctgcggaaaatcacacaacagaaatacgaggtgccttatgaaagtcggagtcgcatctgatctccatctagattttgcggatatgaaccccgagttcttccagtggcgtggcgacctgctgcttctcgctggtgacctcggtgaggaagattatctgcggaagcatggtgctgagttcttcgatggcgtctccaagatggcggagcaggtcttcgtcatctcaggcaaccacgagttttacggctctgagctggatgtagcggaagaccacctggacgtctatctggagcagtggaagaacatcatcccgctccgaaatgaggtgaagtcgtttggtcaccttgacgtctttggtggcactctgtggactgattatcacggtagtcctatcgcggaaatggctgccttcatgggtttgaatgacttcaagcaaattcgcatcaagaaggcaggttaccgaaagatcacgccgcgcgatatcctgatcgagcatatgaagggaaagaacaagctgctggacttccttgagaagcctagtggtggaatcaagttggtgatgacccatcatgcgccttcgatgcagtctgtgccgaaccgttttcgtgctgattacgatttgaacaaagcgtattgcaatcactttgatgcgctgatcgagtctttccctgatctcagttattgggttcacggacatacgcacgattacatcaactatactatcggtcagacggaggtgatctgtaatccgcgcggctacccagctgagcgaccagcacatcttccgccatatcaaccaagggatattttgctatgaacatttttatggggtcctggtctgaccgtgaggatatgatcgcggatttctgccactatgatggcgaaggtcgcgagcgcatcgaaaactatctcgatgacgctcagatcatccttgcatgttacgagagctctgggtacgaaggctccgctttcgtgctgttccgaaagtggggaaagtattacgaagtgaacggtagccactgttcctgctatggcctcgaaggacagttcgaacctgaggaaaccaccatcgaagccatcgcgcatcgtctggagcatgggaacttggggcgtgagtattcttacaccacgagtagctatactcagaatgttttcgcggatgaactggaagaagcaatcatgaggctggagaagatctaatgagcatcgttgaacaactcgctcacctctgcgtgtgggcaggcacggataactaccgttggaagatgaagcaggtcggctggaccggttggtccgtcgacagtctcaaggaaaagcctgccgccgaggaaggctacgagaaggagtaattatgggcggcaacgcttttgataaggcagaacgcctaacaccgcagttctacaaagatgtcgtagacgatatcaagtggctccttcggaacatcatggggtatggctccggcttctctattcctcattctgtgaggaacaaggaaagctacggagacgtcgatgttctggtggcaagctcacagatgcaagctgcactcaaacagatgaagaacggcttcaatgtcgttggtgaaatctcaaatggttgcggctacaatctcctcgttcacactgatggacagtacgttcaggtcgatttgaacaaaaccaaggatgaggacatggaatttgcgttccattacttctcttggaatgacctgggtaacctgattggacgtatcgcacatcgtcaaggtctgaaacatggtcacgacggtctgtggtatgtgcatcgtgatggtgaccatcagctgggtgagatcctgctgaccaaggactacgacactgcgctgtgtcatcttggctttgacgtcaacgatttccgtgcaggctttgattccttcgaacagatgtttgattgggtcgaacgttgcaaatatttcgagccgagcgcattccctcttgagcatcgtaaccatcaggctcgcgttcgtgatgcaaagaggaaggtgtacaacctgttccttgagcgactcgccttcgatggagactacgttccttcggacaaggaaaagcacctcgagcgccataaagacaaatggcctcacctgcgaaatgagatcctgttcctgaattgtcagaacgctgttcgcaaggaagtcaaggctaagctcaacggtaatatcgttcgagagttgactgggcttgatggaaaggagttaggtgagctgatgcagattgtgaagcggatgctacctgaggacaaggtatacagcatgttcccagctgagattgaggaagggatcatggaggcttttgaacgttacaaggtagagaagaatgcgactaattcttgattggactaatggtgagtatgatgacactcgcacctgggttgaaccggtagagtttgaatccaaggaagtcttctttgaaaagctcgaggctaagaagatcgagtacaaggaaaatcgtgacaagcagatctctgtccgtgagaaatatgtgcggaaagaaatcagctatgacgaatacttcgagcaactggacaagcttgactctgtgaatatcgtcgatgacaaggggcgcgagttcttccttggcgatatgatttacatgggtcgctgggatccaatcactgtctacaccgttgatgaatggtacggagattgatatgaaagagaagtcgaaagataagctgaaatactacgctgtgtctgcaaagacggaatcgggtgatgactatctgttcctgctcaaggcaaagaatgctctggatgtagccaaccagttctcgatggctatggatgaagagctcggctacgtctactacaacgctgttgaagccgaagatcctgaggacgctaaggctgccaagaaggccatcaatcgtgcaatcgaaaatgcagagattgactgaggcactcaaagaatttgcctatgatatgctctatggtgttggctgcatcatagagcttctcatcgactgtgcaattggtatctgggaagactgcgtacgcaaagggtaaatactgtggatacatcacacaggacattttccaatgccactaagtttcttccccgatgccgttcctaccgcgatcggctgggcacatccactgaccggcgaacagctgacggcaggtgctattccagcatctcagcttgatggcgataccccggttgatttctacaagccaaatgctaaggccaagtctttccttgacccggctggttctactcgtaacctgatcaaccatgttgctcacggcaagcgagttgagtttgcagttcactccctcgacaagattgcctcagtggcatggacgttcgggggtgcagctgttgctagcgtgaatgttaccgcaggtggttctggctataccagcgcgcctaccgtaacctttgcagcaccgcctgcaggaggtgtgcgtgctaccggtactgcggttctaactggagcagccgtcactggtgttacgatcacgaacccaggttctggctacactgctgcaccagcaattacgttcgccggtggtgaaggcacaggtgctgcggctactgctgttcttgctgccaacgcagctgttacaggtggagctgtccagcagaaggtcttccctgcaggtactcacagtgtcaaggctgttgtttcgtatgtcggtggcactccagccaacgttacgttgaacacttcggtcaccgtagcctaatagaaagaacccgtagcggcgaaagcttctacgggtttttctttggtgttgtttcgtcattgatgttatatcatatagtcatgaacacattctttatttctgatacgcacttcacccacggaaatctgatgaagcattaccctaatgggcgtaatcgtttcgcggacgtggatgaactcgatgaacacatgatcaccgagtggaatgctcgaattggtcgaaaggaccgcgtgtatcacgttggtgacttcggcggatgggacattgaaaagtccaccaaggttcttcgtcgcctcaatggccagaagttcttggttccaggcaaccacgacaagaagcacatcaaggacgagaagttccgttctcagtggtcgatgatctatccctattcgtatgctgagatcagctgcgaaggtcagccgattgtgctgtgtcacttcccaatctgggaatggatgcagattcatcgaggctggtggcatattcatggacacgtccacggcaagccgactggtattcctggcaagattctcgacgttggagtcgatggccacaacctgttaccatggtcgtgggaagaagtagttgaacacatggcaaaccgcccaacaaggacacatcatgagcactgaaatcgaactgctgtttgaaaagcttgaccagatgggcatgcgcctgggtggtctcactctgggtgacaatcctgaaaatgctgagaaggtagctcgcgaactgcgactgagcctggaacgtcttgaggatgttggtctcgaagaaattaccgacttcgactgcaccggcgaaccgactcaggaaaagattgatcgtgatcgccgtgctcttgctcgtatgcagaagcgagctgacgacatcaaggccaagacccgcgatctcaaacgtgagctgggcgaggacctgatgaaatatgctgaagaaaatcttcgcccctattcctatggcaaggcaggcattgaagatgccgtagacaaaatcgtcaacactgccaacctcaatgattacgattatgaggacggctatagtggtttctggcttccttccaacttcggctgctaaaggagaatcaaatgccttactcgattcctatgtatgaaagtgaacgcggctggggttccaagattgatggctatgctggtccgtttccgacctacgaggaggccaaggatttcaagaaggcctacaatcgtaagtacaataacgaagcccgtgctcctgactactacatcatggcaatggatccggtagaaaccacaccgactatgaagcatgactaccgatcaactgtctgagcatgtcgtactagacaaagcttggttcaatcggttagttgagttcatcggtcctggcgccctcacctacatggcaagaaacatgcctgagggcgtcgttaccgtcccattggatattgatctatcgaaagttagatcatagtctaagcaactgtggacaccgactttctgattcctgtataatgctttggtagcacgattcattaaaagaaacttcaaatagaaagaaaaagtagaaggcatgaaaacaatcgaaaagcagtttagaaaactgtcagaggtggaacacgttctgcttcgtcctggtcggtacatcgggagcattacgtcccacacttctgtggaacattgtccgacttcgggaaagatggagcagcgtgagctgactttcaatcctggcttcctcaagctgttcgatgaagttgtctctaactctgtcgatcattcgaagcgcccggaaggcaagaatctcgataccatcaaggttgatatcgatcactccaccggtgagatctctatctacgacaatggtggtattcctgtcatcaagcacaaggaatacaatcagtacgttcctgagatgatcttcgagcttcgttcgggtagcaacttcaatgatgctgacgagtcgatgctcactggtcagaatggtgaaggtgcagcactgacgaatatcttctccaagaagttcactgttgagacttgtgacggcaagtacaagttcaagatggagttctcggacaactctcagactcgatcgacacctgtggttcgaccaggttcgggtggcttcacaaagatcacctatcagcctgactttgaaaagctgggcatgaagggcattgatgaagggaacattgcagttctcgtcaatcgtgtctatgaaattgcagctacgaattctcacctcaaggtgtatctcaatggtagtcgcatcacgttgaagtccttcaaggattacatcgagatgttcacacctgagtatgcctatgacgaaaacgaacactggaagatcggtattgccagtgctgaggatgggttcgctcatatctcgttcgtcaatggcactcgcacaaagactggtggtagccatatcgactatgtggccaatcagatttgtacggaacttcgtgctcacatcaagaagaagcacaagatcgacgtcaagccttcggagttgaagcagcacttccgactgttcattgatgctcagatcgtcaatcctcgctattcgtctcagacgaaggaagacctgatcactgaggtgaaggacttcaagacgagctggaccattgatcagaagttcgtcaacaagatcatcaagtcgacgatcattcagtcggtgcttgactgggcagctgcaaaggctcatcaagaagagatgcgcgagctccgtaagctcaacaaggcaacggacaaggctaacctcaagcacattgcgaagttcaacgatgcgactgaaaagaagaatcgtcatttgacttcgctgttcctggctgagggtgattcggcagccggtcctctgcgcggtgctcgtaatccgaagctgcatggcatctttgctctgcgtggtcgaccaatcaatgtgtcggcagcacctctggcaaaggtcaaggagaacgatcagttcgagaatgcacgaattgtcgttgggttgaagtacggcgaagctccggacttgaacaatctaaacttcggacgtatcattgtggcatcggacgctgaccagttcggtcactccattgctggtctggtagtcaacatgtactaccgactgtggccagaccttgtcaagaagggcaagatctatcgtctcgtcactcctgtggtcactgttgactacaagaagcaggatctcgaattcttctcgatggaagagtttgaggcatggcgtcttaagcatcagaacgagaaatacagctacaagttcttgaagggacttggctcgtcgtctccgaagcagtggaagaagtacatggacaatctggatcgttatctggtgcagttcacgttcgacgactcggcaaaggaaacgatggacctctgcttcttgaaggaagctggtttcaccgacaaacgtaaggcatggttggatctggaatgagatttttcgacgacgatagcaattttgaaacgaccccggcgaatcagtcgggggtcaccaagctgcgagtgaaggacttcctcgatcgagacttcaaatcattctcggaatacgattgtcagatcaacattccgaacatgattgatggtttcaagatcagtcagcgcaaggcagcctatgtcatcaaccgaacgaacaagctcaacaccgttgagcgatattcggcacaggtggcatcggaaactgcataccatcatggtgcaggcaatctggaaggcgtcatcgttggtatggcgcagaacttcccgacctcgaacaatgtcaattggttcgttccagatggcacgttcggtaacatccttgaccacaaggcttcgtctggacgatacatctcggttgaaggctcgcccaacttccgaaagtggttcagtaaggacgacgacctgatcctcgaatacgagtttgaggatggtgaacagattgagccgacgttcttcattccgaaggttccgacaattctgttcaatggttcgtcgggcattggtaccggttactctagcacgattctgaactacaatcctgacgacgtcgtgcgcaatgtgctgcaggtcgtcaacggaaagaagcagaccaagctggttccttggtatcgtggttggactggtgatatctcgaaggctgatggacagacgactttccgtggcaagtttgagcgtgtcaacaccacgaccattctgatcactgagcttccggttggtgttgagcaggagaagtatcagtcacacctgtcgaagcttattgataagggctggatcaaagactatgacgatgactcgacggaagaggctggttggaagatcactctctacacgactcgcgaatggctcaaggcacaaaccgacgaagacctgatggtcaagttgggcttgatctctcgtgagtctgagaacatcgttgtctgggatcacaagggcaagatcaagaccttcgacaatcctgagcagttggtggagtatttcgttgaggctcgtttggagttctacgagaagcgtcgtcagaagctgatcgaggcgacttctgagaaaattcgttggctgagtgagcgcatgcgcttcattcttttctatctggacaactcggctaccttcaagaacttgaagaaggatgccttggtagaactgttgcagaaaaacaagtttgctgactacgatcgtctgttgcagatgcctatctggaacttgacgaaagataagatcgaagaactttcgaaggcaacggacaacgaaaagtctaccctggttgccctcgaaaaagatacggctaaggacatgtacgttcgagagctgaaggaaatcaagtaggaacttgttctttctgcatcgaaacaatatcatagttttacggtaaccaaacaggactttgtgatgatgatcaggttggacggcgcgaaggttgcattgatctccgctgccgtcgctcgtgttgcaggtagtgaagcccacaagttcgtcattgacgagcatctgcgggcgatttcctctgccgttggcgccgaaggcgtctcggtgtatgacctgggcaagcggaacgaaaagactcgcttcattcgtttcgacttcccgcagggtgaacagatcgaaatcgaagtcggtccgcagcctgagttcgtgaaccatgacaatcgccccgaaggcgatgatgacaccccgggcggcacgcctgttgcgatgcggatggcagcatgatcgagatcatctttgggtgggcgcttcctgcgctcatccttctcatcgtaggtgggtacttcacctggaagaaagcgaaggaagacattctgtactacgactgtcttactcgcgggacgctgctgagaatcccgttggttcttatcgccgctgcgtttccgggcatcaactgggtggctatcctcttcatcgtagcctgggcactcgctgtgtatgaacgccaaatctctgacttcttcagagagcctgtctgcggaaggaagaagaaatgagcatctttctgttcgcactctgggcattcggaagtctcttctgtctcgcctacctgaccagcgtagctaaagaccacatcaagcactacgatttgacggttggcgacctgggcttcttcggagtgatgtgcttgttggcggtcatcccggtgtttaacttgctggcaggattcgttatctttgccgagtgggttgaggtcaccttcggacccaaagcaaagcgcatcatcgatttcatctccaaccacccgatatgggacaaggtaatctttgtctcgaaagaatccaacaagaggtaataccgaaatggctgtgaaagaaaagaaggacaccaagacctacgttggtgcacgcatctccaccaagcagttcaagcgctacctggccactgctccgacgccggaagcgaagcgcgccatcaagtcgctgtacctgagtgagccggtcaagttctacagcaaggctgacctggctgctgagaacgaaggtgtcgaaaccgacctgccggtcaaggcgaagtaagaaatggccatctccaagaagcgcatcgctttctggactgtggcactggccttcggggtagcaatttcgctacccctgggcgccaacgcagaacagccgacccagccgaagccggttccgtcgtatgtccaggccaacgtgaatcagttcaagttcacgcagattcctgatccgtcgaccaagggcgagacttcggtcatccgtttcgtcgactacgaactgcgcaaggtatgctacatccagaagatgtatgtctaccatggtggcggtccggcaatgagctgcctgccgctatgaagaagattcttctcgcacttgcgctgatgatgcctctgtctgcaatggcacagaacatcatcatggatacgaacactcagatgctgacccagtcgatgatggcgtctgcaaatgagccgagccgaccgaagcctacgtcgcacaccttctacaaagagcgcgtgccaggcaagcccgaagaaggtttcatcccggtcacaagaaatgcgcctgctgtaaactatgtgcaggataaggtaagggtcgaaggcaagacgatctacatgctggatgatagggctaagggcatcaagtgctacttcatcacctatatcgccgagcgtgaacctgcaatctcctgtgtgaagtactaactcaactctggaaaatatatcatgaaccgtgaacgtctgatctacatcgctgagtggctggaagctggcgctccgcacaagggcaaggtgaagggcttcgacatttccgtcggtgtgcaggcgctcaagagcgatgcgccttcctgtggtaccacctgctgcattgccggtgcggctacgcagttcttcaacgacgaagatggcgagctggccaacgccgcttttggcttcagcgagtggcaggaagatgatgccaccaatgaagccgagtgggacgctgtcttctatgaagcacaggaccttctggagctggatcataaaaccgcagtcgaccttttcattccggtcggtgcaaccggtatctacgctgaaggcaccaactggtcggatttcaacgacccctacaagaccgcacgcgtcatccgcaatctgctggagaccggcaaggtcgactggagcatcgaataatgaaggcaactctgaccatcggtgtgtctgcctcgggtaagaccacctgggcgctgtctcagccgggcgaagtgctgagccgcgacaactaccgttggtccatcatggaagagaagggcatctcgccttcctggaccaactggaagtggaagtgggaaaatctggtcactgaacgcgttgatgccgacctggcactgtgcgcggctcagggtaaggatatcatcatcgccgatacgaacttgaacgagaatgttcgtggtgcgatggctgccaagctggaagctctgggttacaccgtcgaatacaagttcttcgatgtgacttgggatgaagctgttcgtcgtgataacgagcgtgctcatggtgtcggctattctgttctgcagaagcagcatcagcagttcctggacaaccatgttggtcgtctcgccgcagactctgacaaggggactcgtaaggctgccatcgtcgacattgatggaaccgtggctctgatggaaggcgttcgtggaccgtttgagtggcacaaggtgcacctggacaagccgcatactccgatcatcgatatggtcaagggtctgatggcagctgggtacttcatcctgttcacctctggtcgcagtgatgagtgcttcgacctgaccgagaactggctgcagagcgtcttcgcccctgatggctactggcacggcgactgtcgtttgctgatgcgcgaagcttcggatcagcgtaaggacacgatcgtgaaggaagagatctacatgcgccatatccactacaactacgacgtgcagatcgttctggatgaccgtcctagcgtgtgccgtatgtggcgtgacctgggtctgaacgtcgtgcaggtcggcaatccctacatcgagttctaagatgacggacgccgaaatctataaggcggtaatggcggagctcaaggcagctccgttcattacaaccaatcatgcactcacgacaacgaaatttgcaacgttcaaattcaagaagcgttcgagtgggtactacctcaacgttgacttgcattcatggccttcggagcacgagcgagtacgcaaagaattcaactcatggctttataagaagctgaaaccctatggttgggttccctacaccacttccggtggctgtggcgagtggacctaccgacttgatggaggaatagaatttgacttcggaccttaaaatcaaatcaatcaaaaccgtttactctgccttgaacattcctttcccggaaggtcaggatactcacctgtatggtgtgctgaatgatctctgggaaacggctacgactgttgacgttgaagcagtaaggcagcaggcttggcaggaagggtatgatgacgcacgcgaagatcatgcgtgggacagttcaagctgttgattgacctatccaggtcaaagatgtagactgtgagtgtggtagcggtaacactttattattggagtacgtgatttagatggcacacgaaattactgaacgtgcagacggcacgagtgaaatggcgtttaccggtcctcgcagcgcagtttggcacggacttggtcagcaggttgatgaaaatgcttccttcgatgattggaagcgcatggcaggtttggattgggaagtacatgaatccactgtcgattacaccgcagtaagtgcaaagggtaagcctgagaagcattcgattccggacaagcgcgttctgttccgttcggacaacaaggaagctctgggcattgtctcgaatgacttcaagatcgtgcagcctgatcaggtcattgagttcttccgagaccttgtcgaactgcatggcttcaaactgagtactgctggatcgctcttcggtggtcgtcgtttctgggcacttgcagatgttggcaagagcgagaacgttatcgacaaggatcagattgacggacatctactgctgacaacggctgtggatggaacgatgtcgacccaagcgcgtttcacctcaacccgagtggtttgcaacaacactctgacgattgctctgcaaggtgcaagctctcgccctgtaattcgtgtgactcataagaaggactttgatccgacccaggtcaagatcgatctcaagctcatcgacaagggctgggctgacttcatgaccaatatgcggaagctggcgaacaagaagatgtctgctcgtcagactcgtgagttctttgaggagcagctttacaatccagaacgtcgtgcagacgaacaaacctggggcgtgaaccgcgaagtgacgcgtttgaccgatctggctctgggcggtagtgggtccggttactccaagggcacggcgtacggtacgctgtgtgcgattacggagcactttacacacggttccggcaagcgtgatccgtctcgccagttctgggatgcttatgtcggtcatggtgactcgaagaagcaagacatgtatcgcaatctgttgaaggttgcagcctaaggagaaagtagtgagcgaagtaaagaatgtttctgtaaggtttggtgtacctttcctgcctctgttgacactgctgttcatcggtcttaagctgggtgagatcggtgtcgtcgcaggctggtcttggtggttggtctgggcgccgctgtgggttcctgtagcacttgttgctggtatctggggtctcattgtcggactaggcgcgacggttgtctttggcgcatacatctatcgtaaactcaaaggaaagaagtaatccatgaagaagttctttgtagcaattctgatggctgctgttctggccaccactggttgttccgtggtttcgcctgatcctggtcaggaagctgttctggtcgccaagccaatgatcttcggcaccggtggcgtgctggatgaaaccgtcaagcctggacgcgagtttgtggcattgaccacagatgcgatctatgtggacgtcactccgcagaacatccctgtgaacttcgacgacctgtctagcaaggacaacatccttctggacttcgagacgaacatccagctgcaggtcaagaacgcatcgcagctctacaagaccaagggtcctgaatggttcaagaacaacatccaggctaactaccgagccattgttcgcgatgctgtcaagaccaaggacatgaatgagctgatgtctggccaaaagacggctcaggaagtcgatgccgacgtgactgagaagctggttgcgctggtcaaggaaaagctgggtgacaacgttgtggtgatggatgtctctctggggcgtgccaagcccaacccggatgttctgcagcagatgaacctgacggctgccgagcagcagcgtgccaagacgatggtgcaggcagaattggctgaacaggctcgaaagcagcaacagattgctaaggcagacgcagacaacgcatatcgagacaagatgtttctttctccagagcagtaccttcgtctccagattgccaacatccaagccgatgcctgtaaggcaagcaagagctgtatcgtagcgccgcctggcacttcggttctcgtgcagtaagaaaactttctgcaagtaggagaagccacagaaatgtggcttttcttgcgtcaatcgagaactttctggcctacgaaaaggttgttccagaagtgcctgatctgtagactgtgtgagtggtaaacagttccgaaaacaaatcactccaagaggttccgaaatgtctgagtatgtcgtcgttccgcaggtcaagggtctttcgaaggtgccggcttatgttggcaaccgtgtcgatggctaccagactgtctacctgaccgtcggaaccaaggtgaccaacgtctcgaagttcccctacgaactgaagaagttctacggcacgatcgacggcgtggtccacgtcctctggaaggactcgatcaagcgcgctccgcgtgtcaagaagggagaagaagaatgaaccgctggtgcaggttcttcgccgccctcggtctcggtctggccattgcaggcgggttgactggatgcttcgagcattcgccgccacaagaagccagctatacccagaacggcattcaggtcgagaagctgttcgtcaaggacggatgcacggtttaccgattccttgacggcaacattcgctacgtctactacgcagactgttcgcattcggcgtcggtggcatacgaagagaactgtggcaagagctgcactcgccctgtcgtgaacacttcatccaaggaacagtgatgcgaacctaccataaagacggcacccaggcagcaccggacgagattttcgtcttcggcagtaacctcgccggtcggcatggtgcaggtgcagcaaaagccgccctacagcactatggtgcgaagtacggcgaaggcgtcggtgagcagggtcggtcgtacgcaattccgaccaaggatgaacacatccagaccctgccgatcgaactgatcaagccgcacatcgacgaattcattcgtcaggctggtcacctcttcaacacccgaaagtatttcgttactcgaattggttgtggccttgcaggctacaccgacgagcagatcgctcctctgttccgcgaagcgccgtacagcaatatgagcttcccggaagagtggaaaccctatctcgaggactgagaactgttatgcagaagttgatgcgcgaaggaatcatcattgacaccaagcgtcggcaggagggcaatctctccatccaggttccgcctgtgccgtcagctgaagaacgttacggtgactactgcgccaaactggcggcacgtggattgaccccgaaggtgaacagcttcccgtgggcgtggaagggaaagaagaagcccaagactttcctcagcaagaagcctaagatgcgcaagcgtcgcatggagacggtaccggtatgaacaaagaagaaatcatccagaagttggggcgggcagctgcaattgatatcatcctgcagcgcgaactaaccgaagagcaactccagctcgttctcgaggttatcgaaatctcgatggacctggcggaggcgaataccctcaaggcagttgaactccggaacgcagcgcaatgatcgagcacaagaaagatatcttcttcaaaggcatcatgatctttgcggtcatggtgtgtcattctgaccaagagacatatactgaaggcatggtgtaccgcgacggttatatggctgcggctcggaagttctacgagcacttcggctacatgactgccaaggaaacccgtgacctgttcagcaccgacactccggtctggcctgaatggatgacggaagttttcatggaagtggagcgccgagttttcgacaccaccatctgggacaagcaatgaaaaagattctctcaatcgctcttctggctctgagcctcgctgcatgttcgcgccaggaacttccgagtccaccagaagctgcaacggcagcagcgggcgaaaccgtcacttcgccttggacgaacaaatcgttcgagcatcgtgtcgaagccttctcgaagccagacaagtacggcgtggtatgttaccactatctgtacggtgaccaatccctctcttgcatcaaggtgcagtgatgaaccagcaagaagctcttgagaaattgatcgacgccgctgaccatgcctacaaggtcttcctgagtctggcagagcgcggtgaatatccgcaggagcttctgccctgggacggcgaaggtaaagacagtccgttgttcatgggccatcaaggcttgatgttcttgatcaacgcgatcaaggatgctaaggctgtaaagcagcctcaggctttcgttgcagacatgaagacttccgccggcatggaatactatgtcatgttgggcacacctgagcggaacgattcgctcttcatgttcaagagtcgcagccgtgcagagttcaccgctgccgaagtcaactattcactgggcattggcccgcagcccgacgtactggattacgaagaatgagattcgatatcaccactcgccagccctacagctaccgaacccgaaaggtaggtttcttctgggatacctacgacatcgtctacgatgaaactgtgatccgcgaagtgaaagacgagagtcttgcgcgcgaagtggtcgtgcttctcaactgtgcctatcgcgagggtcacatccaagctcagatggaggcgatgatcgatgcaaattgatcttgacaagccgatgaccgagctcaccgtacgagaatacgcctggctgttagcatggcaggctaagcaagtgacgggaatgcctacaggtgaaagggtgcggtggatggcagatgtggcgatcgcagacctggaagattctatcgaaaaagagatgaaataatggacacgaccttctatcaagaagctatcgacgcacttggcaacaccgagccggaaggcttcgatggttgctcaggcgttggtttcatcgacggttgtaagcggatgggctgccacaacgaagctgacgaggccaagttggttgccttccgaaaggcagcaatcgagcaaaaattcgtaggctgagaaagccaaacaccgctgtataatgcttcgacacactttgaaaaggtaattgatcatgacctacgccgcacaagttgctaccgaactgctggacgctctgcatcacgctcacctgctggaaactcgtcagcgagtttacgagtcgattgctgatctgcgctatgcagcacgccacgaagtcgaagtgatgctgccgactctgaaggctgagatcaagcgcatcggcaaggcgctggaagatgctcgcgagcgcgggctgaaccatggcgacgtgatctacgatgagctggttcgtaccatccgtgaagtgaaccacgctcgtgctcacaaccgtcagcgcatcaaggacctggcactggatcaggcaatcaacaaggctgctctggcagaactcaatcgtgagatttcctacttcgaggctgagggtctcgaactggaagtcgagcagatcatcaactaccactgaggaacaagacatgttcggatctcttctcaaggcagccgtaggcgttgccgtttcgcccatcaaggtagcagcagacgtcgtcaccctgggtggcgcgatcaccgaccgtcgtgagccgtacaccgtcactgctgttcgtgaagtcatggagaacctggaaaacgccaccaagccggatccgctgcggtgaccgcctctatctgggctagcaagccgcatcgcgaagacctctacgctgactgtctcgaccactggggtgcacctgcccagaccgatatgctcgtcgaggaacttgcagagctgatcgtcgcggtacagaagtacaccaagcggaaggccacctacgacaacttcgatcacatggctgaggaaatggctgatgtgattttgatgatcgaagagatggcattccatttcaatcaggaaggtcacgcagaagcgaacaagccgtttaccgaaatggtcgcagattggatggctttcaagtgcaatcgaactgagcagcgtctggcagaatccatcgcacgtcggtatccggaaatcgaatgaacgcactcatggtgacatatttcgtcgagaacggtatgggctacctctttgagcagccctccgagatcgctcgtcctttggcttgctcaatgacaggcaagccgatggcatggcctttcagggtggacaagagctttgtccgagacgacggatatgtccctgtgcttctgcaggaggcagcaaacgcatgatcaatcgatataagctcgacgtcctgctgacggatgaagaggaagacaagctctgggaaatgaagaagaacaacgacccgctttatggtcgtcgtatcagcgaatatttccatgtggttgaacacaatcggggaatgcagtttgccattgatcgtctcaacgaagcctacgccaacgactttgttgatgagtttggcattgacttcctggatggcagcgagtacgcgttcgtcaccgacaaccatgacctggcatcggaactgattcgcatcctcgagctggacttcatctacgacttcaaggctgacgtcttcatctttgatatctgggcatgccacgaagcatggctgtcctatctgtacgagcgattcaagggtcgtgttcgcggaaacatgcgcgcgggtgatgtggcagaacggtatgtacgagaaggctatggcatctatcaatcgagccagtcttatcgtatcatgatcggcgagaatgttgctattccgtcgttcctgagccaattcaagagccgcttcctgagaatctgaaatgaaccttatccactgggctgaccaacacctcgactaccgatgctccttcatgccaacgatgctcaacatcaatggcgaaactgagactgttacagttcgactgaagagtcggcagttgtgtcaagggtcgagaatggtaaccattgtgcgagagtccggtgaggttattgaagtgtacctggatgcccttgagccgatgaccgaaagcctgtattattttgatacgcctgacggactatctggttcacttcttattccatttcctcaggaaaccgacgacggctgctaacggagaacactttgacaatttctgcaaaaatcattgctgattcgattgaccctaacggtaagcgaatcacaacctacgaactggaatacccacgcttcatccattcggagttcatgacccatcgtctgttctcgcgcaatgctgcatcgagccgtgcaattccgatcgacaaggcaattcgcctgatcctggaagacaccgctgcaccgagccattggggcaagaatcagccaggcatgtctgcaaaggaagagcaagatgagcctatccagctgaccaagggaacgcgctattcgattagccgcctgggtgcatggaattgggcacgtgatcgcgctgttgaagctgcgactgcctttgctgatgctaagtatcacaagcagatcatcaaccgtttgctcgaacccttctctcatatcaaggtcgttgtgactgcaactgagtacgacaatttcttctggttgcgaaaccatgctgatgctcagcccgagatcaagattctcgctgagaagatgctcgaggctcgctcaaaatccttcccgaagctgctgcgcccaggagactggcacgttccttactacaaaggcggtcattggtttgcgagtggatatgctcgtggcaatgaactcgaggaagtcgatgacaagcgcggcggaagcactctgaaggaagcactggctatctcttcgtcttgctgtgctcaggtgtcgtatcgtgtgctggatgactcgcttgaaaaggctcaggacatcttccgtcgtctgattgatgcaaagccggttcatgcttcgccgtttgagcatcaggcaaccccgatgaaaactctgtacgatgagactgaaggtcctgtctacaactgggatgaaggtgtaactcacattgaccgctacaacaatggttggtcaggaaatttccgtggctggattcagcatcgccagctgatcgaagacaacgtctgttgggactatcatgagcatcagtagtggaactatcgtcgtagaaacacctgagtctatccgttgggaccgaaccatccgcaattggcgttggtggtcggtccttccgatggtggtgccagcagcattgatcatgtttgtcctctatccgctgcactatgtgctatggccaattggacaatggatctgtaccctgtccaacaagctatactacttcaagcctccgaagtgggtcaagcgattaatggattgggcgatgaagaaatatccggaggaaacagatgaagagcattgaaggcaagtacactctacccaacggcgaagttcttgatgtgcatctgaacatcagcgttggagtcaacacctgggtcgatggcgcatggtgtggcttcaacgaagtgtctcccgaagacttcgcattctgcatggaagagatggcgaaggaaggaaagatcatttttgagcccaagcataatggaaatccagacagtaattgacgacatgaaagccatggcatctaaatgggatgccattggcgcaggcttccaggcaattccgattcatacgtggatcggaatgcttgagcagtatcagaaggaacagaatccgcctgaacctcctaccgagcagaagattgatgactggcatctacctatcgtaggttcggacacctgcctgactatcaaaggtcagagtcgttggttccgttgcacagctgacgattgcggtgcgaacgtcttctctaagacgcgtgatccgaattactatgtctgcaatggttgcaactctggctacgaaacgagcaagggactatgaaaaagattacttcacacaaggaagtcaggtgtaagactcctcaggaactgtctgacctgattgctagccttgctggctctgaatggtcactagcagcattcccttctacctttcttgatggcactgctcaagtttcactcgtgaagatcgatcttgttgaatacaagttctcagacaccgagatgctcgactggatggaacggaacgaggcggtctttagcagcacccacgacaacaccttcatggtttctatgcggctgcgcgaaagcaagaagtatggagctctagcgtgtggtctaactgctcgtgcagctatggagaaggccatgatcaacatcaaaggccatcaacacattttcgaggatgagagatgatatatcaagatgcaagtggctttgttcatcaaactgcaagtatgaccgagctgctcaacctgcgtgaactgatcaatcttcggattgaagagaagcgcaatgaggacaggactcagatttggcgagcctatgacgatgcaatgaccattggttttgctacgaatgagcaactacctcagctcctgaaatggatctcagaacgtgctgagcatatctccgaaaagctcgttgttgagcagtatttctgtgtcaactctgaggttgaggattggcttggtagaggttggttcctctaatggcagtctatgtcgatagcatgagagcgcaatatggcagaatgatcatgtgtcacatgctagccgacaccgatgaagagttgcatgccatggcagacgcgattggcgtgcaacgaaagtggcatcagaaagctggcaccgtccatagccactacgacattgctctttcgaagagagcattggcggtccagcacggcgctgtcgaggtagatcttcgtcaggttgcctatataatacgtggtaaacgccaacgcctaaaaggtgacacaccatgaagaagtttctgatcgcactgatgctggttctttcgttgggtggctgtgtgagccgcgaagagtacatcgcagaacaagaaagcaaaaccacgaacgaccagtgcctgcgaaatcagattttccagcagtgtctggcaaccattccgccgggaccgcagaagactgtctacaacgactggaacgaagttgtctcggagtgctcatctgttgcctactatcagtcgctccgtgttcgtagccaggtgaagccagaatgtcgagcacaatgagagacatccaatccgaagggcgcatcgagaaggcagcacgatacaagtgcgaacttctcggtcttgatccagatgaagcgctctggctcgaagatggtcggagcaagaaggaaaagcgttggatgcgagttgcgcgtgagatcgaaaacttccgactcaacctgcaaattgtatcaatgttccttggcgacgaagtgaccagtcctgtatcataagtaatgtagattcacatcgaggcatgttcaatgagtaagcgtttcgtttcaacaaaagaatacaaggagttggctccggttgcatatcgccagtggcgcgatcaaggcaactgtaatctgatccacggctacgcactgtcgttctatttcgagttcgagtcggacaatctggactctcgtaactgggttgttgactacggcggtctgcgtccgctgaaggatttcctggaagagtacttcgaccactgctatctcctggcacaagatgagccgcactatgatgcgatcaaaaagctgggcgacctgggtctgatgaagatcaccgaagtcgaagcaactggctgtgaagcgattgcagatttcctctacaagtacatcaacactggcttccttcgcgagatcggtgcacctgcagacgtttggtgtcgttgtgttcaagtccgcgagacggaaaagaacatggcgatgcgacttggccatcaagaggacaacgaagacctgaccgtcgacctgtctaaatatcgcagagacggctgatcacggtgtaggcaatggcatcacaacccgcgcatccagagcaacgtaagatccttacgaagttctgtgaacaagaacttgtacgtcagcgggactatctgatcaagaagtataagctgagagactacaatcctcagcttttcttcaattggaaaaggaatgcagtccacagttggggcggatcactcgaggatgatataccattcctcatgctgatgcctcatgagatttggcagcacgtcggcaagacaggaaagtacatcttcaatgagtacgagttcctgcatgacaagcctggcatcggaatgggcagggcgaactggaagcagcacatctcatggaccatggctcacgaattggctcacaccatttgtgagattgagcgcttcgcaaagaaagctaagaaagtcttcccgggacagactgcaactgagcatgatggtcatggacccttgtggcagtctgtctactatgatctccgtgtacatcactgccgcgaggaattctatcctgttgaggagattgacttctcaaacgaggtccactactcgcatcacagggaaaagggtgagcaccgctttgtcttctacaaggggaacaagccattcgcatggtttgtccgcactgacggggtcttctggcagaccacgccccgctggcggaaagcgggcagggccagaaacggggccagaacccctcgagaactgaccagaaatctccagaattcgtgactttttgtcctgagagttgtaagtgtctgattcgtaaggttgtcctcaggacagaaagaacttaatatgtggttgtgggacaaacactcctcaacaaacacaaaggacacgaagatgagcaagttgaccaagacccagaatgaagccgtcgccggtgccgtgaaggcagtcactggcttcaagatgggagcggagacttccggggtgcagcacgtggaagcgggcaacatcaccagccgcagcggtcgtaagtggaagaccagcatcgccttcaccaacgacggcggcaagctcaaggcggacctgaccttctccgaagtcggcgccaagaccgagaccacctactccagcgagaacgccgccggcgagaagctgcgcgaattcatcaagtaccgcggtcgccgcctctgcctgaagggcgcggacatccagcgcatccttcgcttcttcaactccatcgtcccgaccggcgaagccgcgaagccggcgaccaagaagacgaccaaggctaccaagccgaaggctaccaccgaagccgtcgccgaaaccgccgaagcctgagccctacggggcggcgcaagtcgccccacctttcggagaacgaacaatgccccgtcgtatcagtctactcccgcagcaggcactggatttcgctcagctcccgatgatcgtctcaggcgatgacgagctggtcgagaaggctctcctggtaaagaagagcgatctacctggcgcctacgcatacgtcacagtcaccatggtgacgcgtgttgcggggaagaccgaggacatccgggtctgcgttcgtaaggaagtcgaataatgaagatcgtgatccaagtcctcgatggtggctggcaggaccagtccgaacatgacaccattgaggacgcagagaagatgatggacgtggtacagggaggcgatcccgatgcctacgtccgtatggtgcagttcgttccgcgcttcttcgctgagtaccagaagcctctccagctgggcagtgacaggacctacacgcacattctctacgtagccgagtaccctgcggacaggagcatcaagtcctgcaaggcgcacttccggtctcaggtccgcaagttgcctgagttcaatgatccgacgttcaaaatccgtcacgagtacgtcaaccctctgtcgtattgaggtaacctggagatcgtcatgaacatcttcgtcacgcacctgagtccggttctagctgcacggaacttggacaacctgcgtctgaacaagatggtggtcgaaaccgcgcagttactctgcaccgcgcatcacatgaaacaaggcagccgggctaaggttctctacaagcccacgcacaagaatcacccctgcgccatctgggttcgccagagcaacggcaactacaattgggcatatcgtcacttcgcggctctggctgcagaatttgaaagccgcaacggcaaagtccacaagacctgggcagatttgaaggacgtgctcgagaacgctccgaagggcatcaaggatgtcgtccgcactccgtttccgaactgcacgccgcacaaggacatggagctgatcgaagcctaccgcctgaccatgaccgagaagtggcaagcggatgtcgaagctggtcgtacgccaaagtggggtgagagattgacaccaccgttctgatcgaacgccaactagaaactttctaaaagcgccagagcgaaagcctggcgcttgacctatctatggtgcccgcatatcataacggtatggagacattattgtggttggcagttacattcttggggccacttgtactggccttcccgccagcattgaagaagctggtgaactactaccgttggtcgaaaactgtctatgttgaggacctgattggatatctcttccgaaccctgtggccaactctgattccggctattggatggttcgttatgccaggactctacttcgaagagttcgttgaaccgattctcaaaatcaagctcaagggttgatcatgtggccattcagtagtcgtaaggatgcgcaaattcgttctcttcatctggacctggcaaagaaagaaggtgagttgtccaaagcactgaaatcacatctcgaaactctcgacaagtacgagaagggactcaactcccagatcgcgctgcttgaagtggtgagccggtggtccagacaactagaccgagataagagcatgagtgagactgatcaaggcttgttgaaagttgtactggaagatttctccaaggcaatatctgagcattgtcagcacaagaaatgggtcaagactgatcgacccgatccaatgttcccaggcgactggtatcaccagtgtgaagtctgtggcaaattcgactatgaggtctaaggaagaaatatgcgtaagctcgtaaccctgcgcactgtcgcagaaattgttcccatcgaaggcgcggatgccattgaagtggcggtcgtcgacggctggagctgtgtggtcaagaagggtgaattcaaggaaggcgataaggccatctatttcgagatcgattcgatcctgccatacggtgacgaacgttttgccttcttgatgtcccgtggctgcaagatgcagccgactgaggatggcggtctgctcgaaggtcatcgcctgcgcactatcaagctgcgcgggcaggtgtctcagggtctgctgatcaagccagatgttgctttcgctgatccgactctctaccttcgtggtatcaatgtcgccgaaggtccgttccttgactaccgtcattcggttgatggtgaactgaagcgcatctacttcaacgacgaagagaacaatgacctgtcggatgtcttcggcgtcaagaagtatgagaagcctatcccggcacagctcgcaggaatgattgcaggcaactacccggtgtggctaccgaaaacggatcaggatcgaattcagaactgcttcggtcgtgcacctgagggcaagtaccatgctgaagagaagttcgaaggttcctcaatgaccatctaccacgatggcgagaagcttggtgtgaccagccgaaacctggacctcaagctggaacaggaaggcaacaccttcatcgacgtcgccaaggcaagtggcatctttgatgccctgactgcttggattgctcgcttcaatcaggatgacttcattcctcgcattgcgatccgcggcgagctgatcggtcctggcgttcagggcaacatctatggactgacggcacatcgtttcatgatctacgatgtctttgctcatgaccattacctgacgcctctgggtcgacatgtcttcctggaagagttcatcaagccgttcgcaggaaagaatgtaggctatgtccatactctgttcacgatgactcgaggcgaatatgctacgaaggaatcgtacaaggagttcctgggcaaggcaacaggcaagagcattcttgcggacacgctgcgcgagggcatcgtctacaagtcagacatccagcaccgcggtgacgtgttctcgttcaaggcgatcagccctgaatacctgctgggcgaaaaggaatgaacgagcttgtcgcatctctgatcctcggtgtcatcggcttctttgtcggtggcatcattggttccatttggtttgcaggattctttcctgcagcactgattggcctcgttgtagggttctgcatcctgtggtgcccgtgtatcttaatgcatctggactaaaaccatggcagatatctttcaaagggaagtgatcgattcgttccgcggcgaccacgaattcctctctaacttctatcgtgagatgatggaatacgatggacatgtttgggcgactgcggaacacgcctaccaagcatcgaaatgtgccaaacaggatgagtatgatctgttcctgaatcctatgctcactgcaggtcaagcaaagcgcatgggcaggcatgtggacatctggaagaactgggactcaatcaaggtgtcggtgatggtcaaagtcatcgacgctaagtttgaggaaggtacgccgttggcaaagaagttgcttgacacgggcgatgcaatcctcattgaaggcaacacctggggcgacaagttctggggacagtgcgacggcgaaggcctcaactacctcggcaacattctgatgcggcgacgcgacaatctgagactaaagcgatgaccacaacgatccatcacaattttgtcactcacaaagatgtgtggcgcaaggcaattgaactggcgattgagaattcgccaccaagggattatgatcaagatgatgctgggttttggcgccatgagctcaaggcgtttgatgaagcctacgctcagctggaaactcaggacctgatcctgctcccgtaataccacacgccaactcaaggagtttgaaatggcaattgaagtgatcggcaaagacccagcgcagtatcgtgagacgacctgtaggaattgtgcttcgattcttcgtttcgttcttgctgacgtacagaagaagcaggtgagcgattacaccggcgatacggaaacggtctattacgttccttgcccttgctgtagcaaccaagttagcacccgaggctactaatgagactactctgccggttaggcattcacaaatggggaaagtggtccaaccgttggtacaagaagtacatcatgctggacccatgggactttgaatggactgaatatcatgttcacagaagtctgaaatgttcagagtgtaatcatcagaaagataagtttgtcgagaccctgacagaagtagggtctgcgcttaaaggaacgaatcagcctacttgggactgattcgctgttcctagtgcggcggcaagttctgcctttgatgagtccaatgcggttgcgagcttctcgagcagctgtgtcagcatcgtgttttgaattcggagttgctgttctttggacagcagctctttcaccttttccaaacactggtctgcctcagcaccaattttaagaagctctgcttccatgtccgctttctccttgcgggcatcgtctctttgcttgatcaggtcctcgatcaagtttccttctgcacggtcacggaccagctctagcttatcgcgggcgaggcgacgcaagaacatcgtcgctccacctagcgcggctacgactgatccgccaatgattgcaggggtgattggttccattactttaggatcaggttgaggacaattctcttccaggcaggaaggtctttttcttcgtgccactgtctatggctaacgaggtcgccttttggaaatcctgtttcgatcaccgtatcaatgcgtcggttgatggcttcaattgagtttcttgcgtcatcaagacgcttctcgaagctttcgatcgacacctggacttcttgcacgatgataaggatctgagccagtaggctttcggatgcagcttggtccatggtagtctttaagggcggatgggtatcgcgatatttatagagaaactttactgaaccgttatatgcagaggtcgtgaaggaagtctataaatatcgaggatatcgaattgataaggatcgagccttgattaacctagaccaactctatgctcgcaccccggtcactactttcaccggcgccgagattatcgcggtccagaaggatggcgtgacgggtgcatctgttctgtcgacactgaagaactttctgaaaagcggatttgttgccaacgatgtgagtgatgcaacgactgtaggcaagcagttgatgaaggttgcatccgtttcagcggcaaagactctccttgaagtgcctgagccaactccggagcctttggctcctgtttcactgactgcaagcactacccttgcaaagacacacgccaatcgccgtgtctttgtgaaagcagctgcaaccctcaccaccaatgcagctgtaatcgctgatactgacacgttcaccatctacaatcttcatacggctgcggtaacgctgactccgaagagtggtgaaactttccgcgtcaaaggcacaggatcagcatcgacctttagcattcctgcgaacacgagtgtgcgagttttcctaatcgacgccaccacttggttcatcgagaattgatagatggatgacctaatttctcttcccgtagtaacagatgacttcgacggacagacagctgccctcgaccaagccatccgtgaggctgcggttgcattcaatttcagctatttggcagacgctcctacatttgagcagctctaccatgttcctgatcttgtctacaaacttgtcgaacactacacgatgcgaggcttcatctgcacctacgatggtgaggcaggtaagctaaagatcgcatgggatcacccaaatatgtcctggctcgaggcgagggaaattactcgtgcgatcccggaaatgatcccaaacctcggcattgcattccgtgctggtctgctctatctctgcatgaccaacggtaccgacctgcgcgccgaatccgacttcaccctgcagactaagctcggaaaggaaatcaaggctgctgctactctgggcaacctgcagctttccttcggcttcccatctgtgccagctccagctgttcagaacctctttgctcctaccttccaggttttggaagaccaaggctttgagatcacctacagcgcaaatgctaacatcttccttttgaagtggggcacaagcatggcattgaactttgtatctgggcaaacactcgaggttgtgctgtcttgaaaggtctcgtaatcggcaagccacactctggcaacgtctgcattaggtaccgtgaggatgcgtcttctacggacttcctgccactgcaaccaaacccgtctgagccacctatcgtcattcctatcgaaggaactggcgatatgttccgtgcgatctacgacaaggatgctaacggtgtagttgacacagccgatgaagttcctgtctcgcacattcctggccttcaggataccatcaacgacatctacaaccaaattggttcgggtggcggtggaggaggaaactcacaggtcatcttcgtaaccaacacaggtggcgagacgttcctacctggcatgcctgtctgtaaggtcggtagttcctacctgcgtgctcgctccactggtccaagacagacatgccttggccttgctgttgatgcgtcaaacccaggtgaacagctaaagattcagcaggcaggtctattcactctttctcctgaaaattgggacttggttaccaatcaggttggtggccttggcacgacgatgttctattacgtgaacatggattcgcaattgaccatgactccgcctaccgacttccctgagtaccttgtaaaggtcggctacgccttaaataatactgacttcctgattgaccttgacttgtcaatcaaactataagagacggacatggcagacttcaaaccccttaagctaggctctaacaacgagctgactcgcttccagaccggagacagcgtcggcattgacgccggtggtaccggttctactacagcggctggcgcccgtacagcccttggccttgccatcggtacggatatccaggaacacagtgacaaacttgacacgctcgcagcactagctggcaccggattcctggttcaggacggcgcgaatggttggcttgcgcgtaccgtagcgacggcctctacaactcgactgactgttaccaatgcgaacggcgttgcaggcaatccaacgttcgacctcgccacagtcaccgacagtggtacaggtactttcaagaaggtaacggttgacggatacggacgcgtaactggcacttctaacgtaacgacagcagacatcacagcgctcgttgactcgacctatctgaagctgtcaggtggatcgctcacaggtttcctgacgctgcatgctgatcctacgaatgcgatgcacgcggtcaccaagcagtacgttgatactgtgatggcgtctggtggtattcctccgttcgctcctgcaaaggttcgtaccacagctaacatcaccctaagcggtgcacagacaatcgacggcgtttcggttgtcgcaggtgatcgtgttcttgttgcacaacagactactgcttcccagaacggtgtctatgtcgttgcggcaggtgcatggacacgcgcaacagacgcggatcagactgctgagttctctcctgcacgtcaggtatttgtccagcagggtacactctatggcttcaccacatggggcgttggtaacacgactgctcctgtcatcggcactgatgcaatcacattcgtgcaggttggtggtgctgctcaatacactgcaggtaacggtctcagcctcacaggtacgcagttctctgcggtgggcgtttcagggcagatcactgtcactggtagcggcattggccttgcaacttcgggtgcaacggctggtacctacaccaaggtaacggttgatacctacggtcgtgtcactgcaggcgcgacagctactccagccgacattggcgctcaggcttcttcgactaacctcaccgcgctgtctgcctacaacacaaacggcttccttgtacagtctgcggctggcacattcgttggtcgctcaattgctgtggcttcgactacacgtctgaccatcaccaatggtaacggcgtatctggtaacccaacacttgatctggctaccacaggcgttacagcaggtacctacaacagcgtgaccgttgacgtctatggtcgtgtcactgcaggtacttcgactgcttcggatcaggttgtaacctcgctgacaaacggcaacgcaggtgcgatcgtcattggtcgtgcagtctacatctccggcgccaacacatgtgatgtggcaaacgccaacaactatggcacggcaagcgtcattggtatcgcaacctcggtgacaaccgcatcaggtgcagcagtgaacgttgctgtttccggtgtcgtcactgcgacaactgctcagtgggatgtggtaacaggtcagtctggtggtttgaccacaggtgccaagtactacctctccaacacaacctcaggtgcattgaccacaactgctccagttacaggcatcctggctccggttggtatcgctgtgagctcaaccaagctggctctgcgcctcgagcgagttgttgttctctgatacacaatcaaacatcggttgatacggaagaggagcctagtgctccttttcctttgaataaatatcgctgtattacaggacagaataatggcctccatcaagcctctttatatcaatgcagcaggactcgaggctcaggcagcttcgggcgacacagtaccggttgattacggcggcaccggtctttcctctctgactgcaaacagctatcttcgtgcggtgtcaagctcagcctttgagctccgcacaccagcccaggttcttgctgacattggtgcgctgtctaccacaggcactgctgcttcggcgactatccttgcgactgcgcgtaccatcaacggaacgagcttcaacggctcagccaacatcacgacctcaacttggggtactgctcgtaccttgacgattggctcgacaggaaagtcggtaaacggttctgccaacgtggcatggagcctgactgaaattggtgcagcaccaactgtccatacgcatgtatctgcagacattactgatctacagacacagctaagtggtcgagttcagcgcggcacgcttcagttgaatccggatggtacagcacctgccacattcttcaacgaagtctccgacactctcgcactcaaatattctaacaactctacaggttccacaggatacccaaccgagtttggtgcgaccctgtctgtgatcatggaaaagcagtcaacacgttcgtttgacctgcatatgccaaccaactcggctaataacctctacttccgaggctattcgtcggcaggtacaccaactgattggaagaccattggtgccctgcagaataccaacacctggactgcaaagcagacgttcgcaggtggagcgaatatggccaacgacgtactccttgagtacggttcgggtggtgcaacaatccgtggctcgtccactgggtcaatcatcctggcttcaggtgccgctgctggtgcaggtattcgccttcgcccaaacggtgacactagcctcactggtcaggttgccattgacactgatggtatcgtagtagcaacaggattcagcggtccgttgactggcaatgctacaacggctaccacacttgctactgctcgcacaatcaacggcacatcctttaacggatcagctaacatcactaccgctaactggggtaccgctcgtactctaaccatcggtggcacaggaaagagtgtcaacggctctgccaacgtggcatggagcctggctgagattggtgctgcatctgctgatgacatgcttttgatcggtggcgacaaccaaatcggtaacggtaacttctacacaggcacagctacaggttggtcgggtggcagtggtagcatcggaagcggaactgctgttcgttctatcgttgatagcactcttgcgagtacgggtaaggcatatcgaatggatattgccaacttacctaccgcaggctacattgaaatcatctctaacaccaacgtcaagattgctcgtgttcagggcggcgaaagagctgtcgtcgcagcatacgctcgcggatcggcaggcgttcgtgtcttcctgcaaatccgttggaatgatgaaacaggtgcagctatctcctacactggtacacctaacaattcatcttacctaacgtctgagacctggacaaagtacacctacagtgctacggctcctactaatgctgtatctgcaaacctttatgtccgagtctacggcaacaccgcagctgatcaatggttcgagacgagccatatctcaatgcaggttggcaatgtaagcacaggatatgctccatccattgatgagctgcgcaacgatttcaacaacctgatcaccactccaaatgtctggaatcaattgcagacattcaacggaggctggaccctaccaaacaacaagatggggttgctaggcactggcggaggttcgatccgaggaactgacacaggtagcgttgtactgtcttcgggaacaggcggcagcggtttcatctacgttcgtcccaacggtgataacagcacctcattccagacagtgttctatgctacaggcaatgtggacatgccaaccgttcgtgcaggtgcatctactcctaatgcagctggagctgtgatgcttgaacttgtgtctgagcgctcatggcagttccgtcagcgcaacacaggtgcgacaactcagctagaattgtttgatttgactggagctaaggactttgtcctgtccaacacatcaaacacgaacgtcattgtgatgaacccgacgaatagctcgatcagtgcaacaacgttcacaggcgcattgactggtaacgcgacaaccgcaacaactcttgcaactgctcgaaccatcaacggtacatcgttcaatggttcggcgaacatcactacatcgctttggggtactgctcgaaacatcacaatcggttcgacaactaagagcgtcaacggttcggctaacgtgtcttggaccctggctgagattggtgcggtagacgcaaccggctttgtcaagaaggtcggcgacactatgagcggtgacctcactgtttctgcaaatgtcagtggtcagatggttcgtgcaggtttctctgccgaccttgcatttgctcaggtcagaacccttggcgacggttcaagtatcgtttggtgggaatccatcctgaagagctcaggcggtccaggaggtgagtcttggtaccgtgcaaagtctcacgtatggacgaacgatcagggtaacatcagtgctactctggacacatcaggcacctttaccgcatacaatgttcttgctgcaaaaagtttctctgtcacagattcaaccgcaacaagcttgatccaaggaaacctggctatcaacgatagcctaaacgccaggggcgtgatgtacttcggtggtaaggttgccaacaccggaaacaagctccgtatcctcaacccagattcttctacctctttacgaattgatgctgtgactgcagatgcgtctgcatttgcgcagatgaacttctatgcatctcagttcacattcatcgttggacgaatcggattcaacggtcaccttaactcgacagccactgcagctgttctttctgctcagaatggcggcacagtatacctgcgaccaaatggtgctgacagcgacactggtgcgacaatcatcggaaccaacggtgaaatgaatgtcagcggtagcatccgacttggaggtaacggtcgtaacattcgtttgtatgataacaacgcagacactgcttgcgttgacattggttcgggtattggtacaggcactgaccgtggcggatatatcatcaaccgaaacgctggaggtgaactatctctttgggctcgtaacggtggtgtccagctgcgcctcggtcttagagacggtgttgcaggtgctgtagcacagctcaacgtccctatgctcttctctgcaccagctatggatcctggaaacgctgcaacctggtcgatcctaactacaggttcctacggtggcggtatcggtatgcgagacaatgcaggtagcggaaactacttcggtggcatgtatgtcggctccggtcagatgtacatcggttgtggtgcaccaaatgaggcaggtattcgtgcttcggttgtgatcaagaacgattaccaatggtacttcacaggtaacactatcaacatcgaaggttcctcgcctactatccgtgtctacgataacgatcaaggctacaccagctggatccaccacaacgacggtaaccatggattcctggcacacaacagcttctcctgggcatgtttccgtaactcagggaatgactggcagtgtcagaacaacatcatcgcctacgcatctgatagacgccttaagaagaacatcgttgatgcaccaaacgatatcatcgagcacttcttcgagaatgtccgcatccgacagttcgattgggatgaagagaagattgctcactataaggtaggcatcaaggcacgagttggtgaggtgggtgctgtggctcaggaaatgcaggcggtctattctgacgctgttgcagtcaatgaggcgcacaaccagatcaagaccaaagacaaccctaatcctttgaagccagacttcttgaccattgactggacaaagactgttccgcttctgattgccgaagtacagaaccttcgccgcagagtagcacaattggagaaccgagcatgagctcacgagtaatcacagaagaaagcatcacccgtattcgcgagactgttgcacctaacatcacgattcaatgggatccagtaaccaatggaggacaggtaacgttcttcatgcaggatcagatcacagagaatggcgtctacaaaggcatgcaacctcatcaaggactgcgccctaaggagaactctcttgatatgaagggtgtgctcattgtgcctatggaagagatcatgaactcgaccattgtgacatcctcaggtgaaacgcctggttatgtgctgatggttcttatcaaggcatactttgagcaggtattcacggatcgtctcaacaatcaggacgctgcggatgcactcaagggcggtacaattcctgtcgaagagaaggcgagcctctaatgccaattccaggttcgggtgcaatctcatttgcagatctaagaaacgagtttggcggtggtaaccctgtaagaatctcagactacttccgcggcggtccgcgagttccaaacacaggaacaaacgcaggcgtaccaacaagtggaatcgtctatctgtcacagtatcgaaatgcgagtgcatctacaccactgactgcatcggttccggatatctacgcatcgcgtctcccaaacggttcggctacacgttcaacaacagtgactgcatctggtggtacaggttcctacagcctcaccaatgctgttcttttgtcaggtagtgcaacagtttcccgaagtggcatgtctgtcaacgtgacagcatctgctaccaacgctgagagaaacggttcggttcgcgtaaccatctcagatggtgcaaccactatcactcgcgacttcaacttctacatgcaattcggtacgccgctctaagcctgtaaataatggacaacgtaatgatacattgcccggagtttacccaatgaagtttgccgcattccaaaacccagctgtttttgatcttctgaaccgcctattcgtggctcaggtgcctgtcaaggtcgcctacaagctcagcaagatccagaaggctgtgactgttgagtcggaacgttaccaagacctgcgcatgaagatcgtgtccaagtttggtaccaaggacgagaaaggtgagctcatcgtcgacgaggcaggcaatgccaagatcgaggatgcagccctgaatgacctcatcgaagagatgaaggaactacacgacattgacgttacgctagagaacaagatcaagctcgatgacctcgagaaggttgacctctccgcaacggatctgtctatcctagaaatgttggacatcctagaagagtaaagatgcaaaagacaaaagttggtcgttatgtctggaatatgctgatcgccattgatcagtttttcaacacagtgtttggtggtgacccagatgaaacgatcagcagccgaattggcaagatcacagctaaccgcccgaagtcttgccaattctgtgtcttcctttgcaaggtattgaacaggatcgatcgtgaccactgtaacaaggtcattgaactcgaccgaggttggagagaggtaatcaagtgaccatgagcactgaaactgtagcaatcaagatgggtgcacctgcggatgtcgcacgagcactcgagaatgcctgcatcaagtttggcatcacaacccagaatcagaagtcgcacttcctcggacagatctttgttgagtcgggtggcttcaagacactacgcgagtcgctgaattactctgtcgaaggagtgatgaagacctttagccgtgctcgtatctctgaggctgacgctaagaagtacggacgcactgcaacccaaaaggcgaaccaacaggcactcgccaacatcctttacggtggcatgtggggactcaacaacctcggcaattccaaggaaggtgatggttgggcgttcattggtcgtggactcaagcagctcacaggtcgctccaactacacagcttgctcgcttgctctgtatggtgatgatcgtcttgtaaagaatcctgctctacttgaacagcttcctgatgcagcactgtctgcaggttggttctggtcttcccgtggactcaactctctggctgagtctaactcgtatgaacaggtcactcgcaagatcaatggtggccttaacggatacgattcacgcgttgcagcaacaaagaaggcatacgcgctcttcgaatccctaaagggctaagctatgtctcaagcaacacttcaagccgcaactctagctatcctcgcaggtggcgcatcctggacacagggcgcccttgcacgaaaggctgatggtctaccatgttccccgttcaatgaagatgcagttacatgggacatgatgggcgctctgatcaaggctcaactcgaatccgacgagcctaactggaccagctatcatttggtctacaacgcacttcgagatgctctgcctgccgactacaagagcagagacatcgaagcttataatgatgacgcagatgtcgtatggggcgacatttccgctttgttcgcctgattcaatcgaatcaactcaatccaacccagactcaaaattgaatattttagaaatattctgagcacaatacaaggttgtttggcgtaacatttctgttaccctaaacggcactgtaaaggagacagattatgaagaaatttgtaattttgtttctgctgctgatcacttcaactttttcaacattcaatacacacgcagccgaaacgatcatcatgcccgaagtaatcctggcacctgcgccagagattgtcgtggatacatccatcaaggtacacactttcgtacctgacctctcagagccagacatccttgtcgcagctctacccagtgaagcagagcttcgttgcctgcagaaaaatatctattacgaagcccgaggtcagggcaccagcggaatgacagcggtcgccaatgtgaccatgcaccgcactcaagacagtcgctatcccagcacagcctgcggcgtcgtcaaacagaaaagtagaggcacctgccaattctcttggttctgtgatggaaagaagagtggtggccctagccttcgacaggcagcagacgttcgagcatgggagctcgccggtgagattgcactaaaagcactcacaggcaccctgcgtgatatcgtcaacggtgcaactcacttccacaacacgtcaaccaatccaggctgggctcgaaagctcaaccgaacggcacgaatcggaaatcacattttctatcgttgacctgttagtctaatttggtaaccattcttcggagcgaaagatgcactaccacccgcagcctgataccgcagtgttcgtagttggagcccatactctttcgacgacactgcgatggctcggaaaagaggcaaccgttgacatcacaggtgagaaacttcaagacgtgatgcgacgagttgaccgcgcaactttctacaacaacggtgaagagaccgattgttctttctacgccgctctgtagactacgatcatccaaacaggaatttgaccatgtatctgcagttgtcagactttgaccacctccgcgaaaacccgaacgtgcgtttccgcgaagagaacgtcgccggtaaagatgtcgtcatcatctcttatatgctttccagcgacgagctgtggaagctgccgctcggtgtggaatgccgtggcatcaccttcgatgcccaaacgggtaagctgatctcgctgcctttcgagaagttcttcaacgtcaacgagaaagcacatacccaggctcacatcatccgtgactacaaggtgcaagctgtcctggacaagcgcgacggttcgatgatcactccgatctgggctgacggtcgtatctatctcaagaccaagaagaccttcacctccgacgtcgcagtggcagctcagcgctccctgtctgtcgagctggaacgcttctgtgaagccatgctcgaactgaacttcactccgatcttcgagttcaccgatcctgactgcaagatcgtcctcgactacggtcatgactctcagcttgtgctgctggcgatgcgtgatatgatcgacggttcctatgtctcgtacaaggacctggaccagatctccaaggcttggggtgtgcaactggtcggcggctataacgctgactataccgttgatggctacctcgagctggcaaagattgccgagggcatcgaaggctgggtcatctacaccgatgaaggtcgcttcaaggtcaagacgaagtggtactgtgatcgccatcacctgatcgatattcgtgaacgcgatatcgctgccctggtgctcgaagagaagctggatgacctgatcccgaacctgctcgcaggcgatgcggacatggaagccatccgtgagatcgagcgccgggtgaccgatggtatttcccatatcatggaaaccgttgccttccttggtgtccacgcaagtggtatcgacctgggtaaggatcgtgccgattgggtcaacgccaactgtggcaagctgtcgaagtttgtccatcgtgctgctcgtggtgtggagaactctgacgagtccttcaaggagttctatcgtcagcactatctcagcaccttctcactccgttcaatcggcaaccccaatttccgcgacgaggaagaataatgaagtacaccgttaccattctgttcaaaggcaatccgcagcccgtcatcctcaatgaggttgaagagttcactgtgaagtatgaaggtgataccatcaccaacctccaatggaagctggcgccaggacagaatatgctctacattgacctgagtcagatcgcattcgtgttcgcagtcgaggacaagtaagaccaaagttcctgcaaccacttcgtaccaaaacccctgagacccagagcccttgtaccccaaggttctctgggtttcctacgtaagtgtctgattcttggctccaaacagattagcaagtgtctgatctataagattgtcctgtcctacgaaagtctttaatatgtggttgtggggcaaacatacagcccgaaacgaaaagacaaaggaacgcagacatggccaagcacgtagaactgactccgagcaagacctacaagactccggaaaacgctcataaggcggtggagaagttgaacttgccggacttcgtcggtgaccgccagctgcgatacatcatcatgacgcacaccgacggtcgattctatccggtgttcctgggtgaaccggcgatgcaggcaggtgttcacttccacttctgtatcctgggttaaggagaagatcatgagtaagatgcgcatcctgagcggcaagaccttctacatcgaccgataccatgacgagcaggtcgagcggcacatcctggtcagcctcaacgcacgtgagcgcaaggccatcctgaagaacaggaagacccgctacaacttcatccgcaagctgcaggatgccggcatcgtagagcgcagtgggtgccagtgcggtcactgcatgaacggttgggactgctgcggcaggtggttcatgtcccgggcgaagatcattcctgcgccgacgggcgtctacatcgtcaagacttacgagaggaacatctgatgaagaccaagaccaggaacattctgattggcttcgtagtagcactgaccatcggtgcactgtggatgacgaccccgaccgaatgcacgcacagcggttcggtccccaaatattgcgtggactaagatcatggaacacaacgcctggctgtataccaaagaccgtagcgagctcgaggacttcgccatcggcatgggcattgacccggagcagtgctccctcgacgaatccctgattgatgcaatcatccagaagctggaggaacagaaatgagcaggcagtttgtcatcctcaccaagggcggtgagcaggtcgctgagatcgacaccaacaccttcgccaagatcatggctgggaaccgcggcgagatgcagctggttacgacgcccgcaggtcgtggtgtcagcgcctttgtggtcaatcagccgcacagcttccaaattggcggcacggggctgaccactttggacatttcgatcgcgatggatgcgggttatcgcatctaccgttccgaggatatcttctaatgaaggtcgagaacatcctcctgcaggaatacagcggcgaggctgtcaaggacatgccgaagatcctcaaggcccatcacttcatcatggacgcgaaaaacaacatgacggaacgcgccatggtgtatcgtgatgtggctcgccgagctctgggacacgacgtcccgatggacgtttccgatatcgaactgatcggaacctactaccaggagatgtgcaatgtcttcctccgtcaataaggtacgcctgaccaagtggcagcgcggtgaaatgtccttcttggtctccgtgatggaggagggcttcgacgacaacggcgacgtgatggaaggttacatcgcgcagggctacggctttgaccgtgctgaggaactgaccgacctggacaagaagctccgcttcaagcgccaggcaggctccttggaagtcgaactgaacatccgcgaagccaggaccatctggcacgaattcgacaaccgcctcgatatcgagctgagcaactcgtgcagctcgaatgatgaacatggtcgcgcctaccgcaagctcaaggatggtatggcgcgtttggaagcagttttcggcagtgacgtgaggaagaagcaatgaacccggaagatctcaagcgtatgatgttggccagggcaacgaatgcagcacatgcaatgtggggcgcaaagttctgggttgatcttccggaacaggagcgtgagaagcgactgaaaaagatcatggacatcctcggggagttctcctaatgctccgtcgtttcttcaatcgtcagaagcctgtcagcttcgaggcccctccgccgcagggtgatatgtatgagctctggctcaaggtcggcaaggtgcatatcaagtccgcatccttctgtcatcgagttgcggtgcagttgatgaacctgcgcggtgggaagtgggtggcccagcccgactaccacggcgacttggtaggcgtctacaccttcacccaggacttcatcttcatccgcgttcgtgatgatgggtatggtaacgagttgcagcggattgagatcagcatcagtgaaggctcctacctccggattccctgaaaactggcctacacatcgtcttaacgagtggtctatataatgcagatgccggcagaaactttctagtccggcaccaaccaaaaggatcatcgtcatgtctacgctcaactcccccgctcatacctacgccaagccctccggtgctgtcaactctgtccgcaagatgcatgtggagcgtggtggtgaggaagtccgcttcgtcatcggtaaggaccctgcaacaggtcgctactttccggtcttcatcgaccgcatcaagcaggtgagtgatcaggagatcatggccaacccgagcgccaaccaaacgggtcgcgcaaagaagcgagccagcgctcgaaaggctcctgcgaagaaggcagccaagaaggcgaccaagcggacaacgcgcaagaacacgctgcactgaaacgaaagtttctgagagaagctgcccgtaagaaggcagcttttcttttggctgtttttcgtgaccacacaagaaaggaattatctatacaatttgtatatcgacaaacggagcaccaatgtgaagttgttcaagaccgccatcgccaagctcaacgccatcccgagaaagaacatcgaacgtgtcgcggcagttgtcgtgttcactgcggtgactggcgggctggcacattccttcatcaatgatggtgggatggaattcttcaagccgaagaccgttgcggtggctcaggttgatacctatgccaagccgatcgtcgaagagggtttcttcctgaccaagacgacctggcctgattacaaggacacggtgtcggctgagcagtatgcgaaccaatcgcagatcgatcgcacccacctgggtccgtgcagcaaggacaagccgtgcgagaagccgaagagctatctcgactataacctcccggactacctgaccaagtaaggaaacgagcatgaacccgatcgttgaaaacgcatacacctatcgcatccagaacgattctgagactgttgtctggaagtcccaggctcgtgatgaccgaaaggtagaagccatcaagtctttccgtgccgccaccggcgcaggtctcctggaagccaagcaggtcgtagagcactacaaatctctctacgatcagaagatgcgcgaggttggttcgaagcctgccaatggcagccgtatcgtcaacctgcgtcctggcactcgtctcgtggtcgccgaagatgtgcctgggttcttcaaggtaaaggagatcaccgagcgcgacctcggcattgtggacgagtatgatctccttcagttcattgctgatgcggcagcacgtctgggcggaccggtggcgtaatgcctttcgtacttcatcaccgccgacaggccagccctctaccgatggtaaaagaatggtctgaggtcgccggctcctattccgaaaccatggaaggtgtcaaggctgagatggaatggtgggaccgttataatgagcaataccgactgacggattgggaattcaaagtggtacaggtgaaggcgaggaagggatgatggaaaacgatttcggcattgactatcatctcaacatcatgaacaacgggcgaccaacgcctgaggactatctccctcctcgcccagagaaatgcctctggaagatcatctcgttcgatggctactatgccacctaccgcaccgaatgcggacagctggaagatatccgtgctgaggaatgcgttggcatgccgatgatccccgagcctcaaggcaagtactgccatcattgcggtggcaggctgcatgtgaactcgtcgttcaaaaggaagacacactgatgaagttctacatcgtgggtggcgcagtccgagatttcgtgctgggcaagcacccgaaagacatcgactacgttgtggttggtgccactcccgaagacatgctggacatgggtctgaaacaagtcggtgccgacttccctgtattcatcgacgatgagggtaccgaggtcgctttggctcggaccgaacgaaagactggcgtcggctacaacggcttcaccactgaccacagcaagactgtgacgttggaagaggatctgtctcgccgtgacctgacgatcaatgccatggcaatggatcgggttaccaatcagatcatcgatcctttcaatggtgagaaggatatcgaggctcgcctgctgcgccatgtctctcctgcctttgcagaagatcctgtgcgtgtgctgcgcatcgctcgtttccgagccaggttcggtggagagtggaccatcgcggatgacaccatggcgctgatgcaggctatggtacgccgcggcgatatggctcacctgacgaaagaacgtgtgctgttggaaatggacaaggcattcagtgagccttatcctgagctgttcttcaccacgttgcaagagattggcgccttgaaggttgtcttccctgagctggtgctggttgatcacctggactatctggaaatcagaaaggcagctggtgcttcgcctgcctacatctatgccgttgtcgccctgtgcatgtctgaaaagaatgcgctgcactttgaagcgcggatgcgagtgtgcagtgattggcgccgaatggcacgaatgtatcgcatcatgatgagctgccgtatggacagcaatcaggtcgacatcctgtacaagatggatgcctacaggcagcctgagttgtgggaggacttgataaggaacatggccaaggttggaaggactcgtgagagattcttcaacgacctgttcgttgtctggtccgccactcatggcatgggcttcatgaacctgaccgaagagcagcgcagcacgctcaagggtccggaaattgctgaggctatcaaacagctgcgcaagaaggtgatcaatgaaactcggtgacctgctcaacgacaatcagctattggatctcatacggcacatccgcgccgtgcatgatgaaaccaatggacctaagaataagcttgcgcgcgaactaaagcaagtgctgtccgaattcgagttcgaaccgaaggtgatcaatgggtaaggtggtcgtcgatcaaggcgcactccgaatggcactcaatgtgctgattcgggcaggcaaaacggaagtggctgaggagttggaagcctcagccactgactatcctgagctgcctgcggacggatgctatatcgtccgctttgatgatgccgaaaaggcagacgcagacttctgcggatacgacgctcgagatgcagcattgaagtactacgatcacatcgcttggaattggaacgggcatctctatgtcaagatcgattccaacactcgcgatgcggagaagcagtttccgtcactcaaagtggcagacatacatcgcttcggtcgcgccaacccatcacaaggtgtggccaccacttcccgttgatctgatcattcaaccagacacgctcgccgttggcatctttctcttcaagcacattgaattggaactggtataggatttcgcagaagttcacatctcgcttgagctcatggagggacaagatgtctctcctgattccttttgtgccattctctttcacatagttgttgatgaactcagaggaagagaagtaggtcatccaattggacgctacctttgagcggcgcttctttcctttctgtttgcgcatgccgttgaagaacttcttaccaatgtacttcttgccgttcggcattgtgatcaggtagacgaaaccttcgtagccgtcagcgccttcctcaggaaaaggctgaccacggaagtaccagggatcacactcaatcactttctttgcacgagccatatcacagtcatctgttaggtaggatgagatatttaacctcggtccctacacagtcctgcagatgttaaaaagatgttaagcggaccaccacagtccaatgactctacgggacgcccagcttttaagcgctgatccagtaaccccttgatattactagcattctggtcaggaagggcaggcacgtaagtgtctgattctattgggctccagcactcaggggctgtacagatgacgggtcagcgactgtcagcaatgtggttgcgggctccttaacggatcctatacactcagggtgcctgacgtctgagtcaggaaatcgggggacaaaccagtttagattgtgaggagagtgtcatgccgcagccgaggtatccgatgatcgggatagtggtagccgtagccactgattgggagttggtgaaggaagtgaacaaggagcttgtcctacatggagtgagtcctgaggcaaggcgagcattttggtttgaggtcctcaaggtagacaacgcgttgaggatgggtgagatagcgcgagagtgggtcacggtacatccaaccatccaataaagggaaagcccggaccgttgagcccgggctttattgcaactatcaaccgccgaggttggtcccggcattctgtgctctctgattgtcggcactcgatccgatctgtacccaacgtcggtattgaagtgttgtggtgacagtctgataggtacctgagttaccgtaagcaatgtccatggcgccaacggcaatcggataagcctcctcgagtcgaacaccataggtcggctggtccatctcattcaagttccacatctccacattggctgtgaactcgttgtagaaattgagcgtgttggaacgcacattgatgacggtgttctgccataggtcgaagtatctacgggtgtctgcatcagcatcagcgtagaaggagaacgtcacaggatcgtatgcctgagtataaggaacacggaacgatgagctgttctgtgcgcgttcggatgtcaccagattgcgctgcgggaagttagccgtgtggcacttgatgttgatcgaaccgatgccattgaaacgtgcttcctccaactgaaggcgtccgcggcgtactcgtgcatcaatgaaatcagcactgccacccacaccctcaggcagcacaaatcggataaggtacttgttcggtctcatcactccacgttggaagtgagagaggaacttcatataaagggtctcgttactcatgccagtcctgtcttacgccatacctggcgggctgtttgtttctcaaattgctgtagcggaagcatcgctacctcttcccagtactcgtccgatacctgtaccaaacgtgatgtgacgtgtgatgcaagatagcgatgaacacatggtgcgaagtattttgacttcacgacgttcttaaggagcttataggacacagccatataagccttgtcggttccggcacgcttacgatactcgatgagcttatccatcagcttcgcacgcatcacgggtggtaggtaatgcaggttgagcccaagccatccgtcggaatacatctcgacaggaatcacacagggaacagtatcataccagggcagtacatctttgtacttcggatcgtaggtatagataaacatgccaccaatgaaggtagatgagttgcgcttggcaccaaaggcctcttcaggaactttcgcacgcttgagcttggacttagccatggtatagaaccattcgattgccttcgccgtacgcttacgatcatgaaggatcagcttttgctcgatggtctttttaggctgcgcgcccgttctatttgcagtcttctttacagtagccatatgttacttccttttggcaatgcctaaatcgtattcggtcatcaccttgaattccatgccatgcttctctgcataggccctcgcggcagtccacttatcctgatttacttgataggtaacgcactcctcaagataacgctcaggcttcttccttccctttgtaggagcgatagtctgggactcaggtttgatctcaatcagcatagtctttaaggaaccatcagacatcttcaattgaatgatatagtcaacgaagtagcgacggttcttacactcagccgaggagtaatagggaatgacgatctcctcactgttccactttactacggaaggattgaggtcacaccatctattgaagcgaagttcccaggaagaacgatacaccacatcattagcattgcctacgtacttttcaggatgaagtaggcgatagcgaccctgttgatacttgcgtgccattgttaaatcactcgtttaggtagctgcatagggattcagctataagttgataatctcggttgaaaacaggctaagaattgtgtgaaagaaacaccatagccgaaggcacctgccttttcgcctggattaaatatctgtagacttctatatttaggcatacgattgtggcacgccaacgatcaaacaaaacgctatacagttacccacctgacctctcggacgagtcagtacacccagctgcgatcgagttcaagttctttgagagaagctcccctagggaaagcagtcctttgaatacggtccatctgtatatgcccgaatcggtagcccagccctctacggttgactggggcgactcaaacctcgggttcatcggaaacgctattagatcagctgccaacggtgctatggcaggactctcgggcggtctcaacgtaggtaaggctatcggggacgctgtaggtatggcaggtgatggtatgcagctgtcaggtgcctatggacttgccaacctcggaagtgctgccgctggtctaatgggcggtaacgttactgcggaaggactaatgggcgctgtggctggtatgatccctaacccgtatgtgactgcgctgttcaaaggcgtgggactgcgtgagtttgcattcgtctttaagttctatccattccgagaagaggactgccaggagatctacgacatcatctctgtcttccgtgagaacgccttgccttcatatagtaaggactctatggggacaggcaataacaaagcactgctcaacttcccatctgagtgtgacatccgttacctatggcagggaaaggacaacgagtggattcaaaagttcaagcgttccgtctgtacgtctatcgacattgactacactggccaaggtatgttctctactatgcgaaatggcttcccttcggagatcacaatgtctaccaagtggaaggaactcgagattgtgacacgcgaagacatcgtggagggttactgatatgccatccttcttcaagaagtttcctactctaagctacactgtagatgggtacaacaaggacgctatgaacatcgtcactgcggcggtgttgaagcgtatcaacgtggacaagtcctatgtctatcagtcctatgatgtgcctaatggtgcatccgcggagtcccttgcctatgacctctacaaggaccctactctgtgttgggtgttcttccttgtcaatggtatggtgaatccgttgctcgattggcctatggatgattccgtactcgaggagttcgttgttgctaagtatggtagcctctactccgttgtctacttcacggacttggatggctatcgacttgacgatgtggctgaggcagctgtgcgtgcctatgtagatgctggtaaccctatgcctgcgaacgttcatcctgtgacagcattggaagccgaatcagagttgaaccgtaagcgtggaaagatcgtcattgtggctccgcgctatatcaaccaatttgtagacttgttcaataagagcattgaaggaaaagtatgaccactgctacgactagtgccaactatggtgacctcaagaagtttgtcgtcactattggcgatgttgatgtctctgctgctgtgatcagtgcacatgtctttcaggagatcttctctcctacgactactgccattgtgaacttcctggatacatcgaatctgttgatgactctccctatccgttctggtactcgtatcaaagtagagatcgagactgatatggcgtctattggtgatggtgagcagtcgtgggagttcgtcatctataagatcgccgataaggtggctagttcccagggtgtgttggagtactccgtctatgcagccgacgaggccttcctactcaatcagacaaagcgtatcaagagatcctatgcaggtaagaaggtctcggacattgccacatccgttgttcgagaagcctttggtaagaaggttgacgttgatgcttccgacaatacgatgcagatgatcgtgcctgggtggactccgttccatactatgtcgtggttgttgcagactgccacaaaggatggtgctgccgactatgccttctatcagcaggctaacggcgacttcgcgttcaagtcgttcgaaggactctattccgatcctgacgagtacgcgggtatcacattccaggtgcgcccagctaatctaaaggacaacaagggtgattcgctctacgactatgccactaccattggtgtctattggtttgaccacttcgacggactgagtaacatcgcatcgggttactattcctcaaagactgcgtcctatgacttcaagaccaaggcatgggaaacaaagacgttcaagtttggtgatgacaacgcgcaggacaagaagtacctgaaggtagactcggagtatctcatggatgccgaggatgcgaatatttcgttcattcctaagcatagtggcatgttcaagaatgcagcgtattcggatactgccgatgcctggattgcctcccgtaagtcctcactgatgaagttcgagcaagagaagttgatcatccagttcccaggaacggcgggtgcagctagatggttcgcgaagtccgttgatgtggacctgcctgctcaggactctatgtccgatgaagagttcgatactcaacgtcgtggtcgctatgtcatcactcacatggctcatatgatcaacaaagacacctacaagatcaacgctgagctggtcaagaagagactcgaggaagcataacagctgactgagcgcgcgtaccgctgctctgtttactcggtcaagacctacatacaccaatgcgatgacttgctcaggtaagccatcattctatcaataagagagttctatgtcgcaggtacacaatttttcgttcggtggcggtgccttcgaatggttcatcggagttgtcgaggatagaaatgatccagagaagctgggtcgtctccgtgttcgtgcattcggctactatgatgacgaagccattccgacttccgacctaccatgggctgtgcctatgcagcctatcacttcttccgcgaagggtggtgtaggttcttctcctacgggtattcaagaaggctcccatgtggttgggttctttgccgacggaaagaatgctcagactcctatcatcatgggtacactcgctggtgctccaggagggaagcctgatacgaacaatcttgctcgtggtgaagacctcggacagaccgtcattgccgagaaggtgaaagccgtcaagatgtccttggcgaatagcaatgcgcttagtggactgtctgctgccaccaacatggcgaacaagatcaactcgactgtcaaggatgctaagtctaagttgaatagtgttcgtgatcagttctcgaacattgcaggtctgtcgaatcttccgttcatgtctgggttgaacaatatctcatctaccatgacacagatcgccacactcccatctgaggctaaggcactgcaagcccaggttgaaggagaggtactcgcgatcaagggacaaatcgagaacctgaagaacctcgaccctgaggcactggcaagacagttggtacagaatcaggtaggtgatgtggaagccgcagtgagggcaatcaagtcactcgacttcgactctgtgatgggttctatccagagcattccaatggcgatcggacagatcggtcgtctccaggatgccatcaccaatgcaggaaacatcggaaagattgtaaccacgattcaagggctgtcgagatctattccgaatctcgcatccatccgagcactgggtacgacgatctcatcaatgaacggatggttggagcctactactatggctgcaccactctatccattgaacaagatcatggagaccgaaggaggtcacctacaggagttcgacgacacacctggtaaggaacgattccatcagtaccacccaacaggcacgttcaaggaagtacacccagatggatccaatgtcgataaggtggtcaaggataactaccgtgtcgtgatgggtgatgactacctacacgtagaaggaaaagttcaagtcaacatcgttggtgatgcgacagtcgtagtcaatggtgattgcacgacccaggtatctggtaacaagacagatatcgtgaacggaaattattcgttggctgccggaggcaatgtgtctatcgcatcaggtggagcaatgaccatcggtgcagctactcagatggctattcgtgcaatgatgatcaatctcaattgatcaaggcatgccttaaactctgggttgagctggttcttgacccaggcacctttctttctaacttttctttctgataaatcaaattatacagaacggtccaatacggtgtccacaggactaaggacttgtacctttgataaatatcgtgacctaacagagacccatacaatgtccgactttcagcaattcctacaagaagcatccctcaaagagtgtgacgagctcaatgaaagcctaatccgttccgcaggtgcgtctttatacggcaaggcaaagactactcctgatcacgtcgcatcccaggaaaagggacatgtgaacattcacacctataagaccatccgtcgatcgggtagtgataaggaaaagacctatcacgtcgtgagtcatggtccttaccgtaacagtggtacccataagatcggttctcagcatacccatggatctggcggacaggcatctaagttggtcggcgtctccgaatacaagaacggaaagaagacgaagactcacggtgaagaccactctgccaactcccactccattcacgtgttcaagtaagtcgtaaatagaatagagacaacccaaggaacttttcataatgccaagctcgacctctacaaattaccagttcaacaagttcatggaatacttcctgaagggaactgcgtacactccgcctacttcggtttggcttgccctgttcacgactgtgcctagccttgctggtacgggtggtgtcgaggtaagcacatcaggtaccgcatacggacgtaagcagattctgtccacaggtacttcatggaacggtccttcgggcaccaaccaggaatggtccaatgcagccgacgtcacctataacgtgccaacaggaaactggggtaccgtcacgggtgcaggactgtacgacgctgaaactggcggtaacctactctacatcgcaacactggcgactgccaagacggttaacaacggtgacggtgcgccacgcgtactcgcaggacagttgaagatcagtcgcgctacttgctgattgttggaaacacggaaaagcccaggttcatcgcctgggctttttcacggctagtgatcttaggtcgttgcgatcagcctgacaaactcttcgggactgaccatgttttccttgacaccatagtatgccgtatgccccacgacgccatccaggaaacagatctgggtgtaatgcgcccactgggtcgatttgttgcctttgacgagacggtggttgccgtcgtcatcgaactcgtggcgcatctgttcttcttcgagagcgatccaggttccttcatccagcggaccgacgactgcttcgacttccttcagccacagtccccaggctgcttcgtattcgccctgcatttcggcgttgtcccaactccgcgtttctgcgttgtagtacttggccttgatgtcgtgtgccttctcgtagttggcagacttgttccgcagggcggtgtattcgctgtggtgaatgctgttcatggtctttgtgctcacttgatgatgggttgggcttgcttcgactggtcgtattccggttcatccgggaacctgccgaagcggtcggggatcagcgcctggacaaagcctaccggcatgtcactatagaacataccgacagcggtagcgtattcttcgagcgccttcctggtgtccgcttccacaacacggatggcgtgttcggtgccatcacggaacaccaacagtccctcgttgtcgcccatgacgaacttctccttcttctgccagccgctgatcaggtcactgatcaacttctctgcaatcatgggatggatgttcccgaccatgatcacttcgggccagccacgttccgtcaaaccgacggtgtacacaaacccaggatccttgtcttctggatcaaacacaccgaccatggtgtaaccgttgatttcgattttgatggccagttcgatggcgagcatttcgttcatcagttcttctccagttgagagctgttcacttcgatcaacacgcgcgtctttcccagacgcaccgcatgcagtactccgtcctttgtgtagaacggcatgacgatgggaccctgaggacgcataccgccaccgatggtccacacccattccttgaagtccggtttcgccatccgctcctcaacccacttgcgttggaaggcggtgagattgtaggacttgatgttcttctcgaatcgttccttagtgatcatggctcagcactcctcgagcttgatcttggaacccataaactcttcccacgccgagacgtccttcttctttccgtagaacgcgagactgacatacagccgtccctgcatcccctgttccgtgtaggtgaccttgttggccagcttcttcggaagacccaggtcgatcagtccctgacggaactcgcgcaggaacttctcgtcggtgtagatgaagccgtcgttgcgaacctgccacgtctttgcatcgaaacgcgcgtcgatgtagagcgtcatgtcctcattcttgccgaatgcttcttcaccgtagagatatgcttgggcgatcttgatcgcattgatcaggacttccttctttgcggtggaccaatgaccgcgaccgctggtgtttgcgaacagttcaactttcacagacctatctccttttcctgtgcgtcacggatttcaatgaccattttcagacgaccttcaactgccttgacgaacgacttgaagaagcgaatgttcttcttgtcgcccgacttgatcgccgccgctaattcgcccttccgaagttccaactcggcttcgacttcgcgaacctgccgataccgagctgccagcgtaggacgaggaacgtctttgaagatgtcggtcatttctggttgccctactgtttgtccgtgccacaattatatagaactttcgtgtcctgggacaatcttatagatcagacacttacgtatctgtgtgaattttagccgtgaaagagcccggatttctccgggccccttgtattacttggtctctgccaggacttcggtacgtcccagatgcacagcccgcagcccgtcctcggtcatgtaggccaggaccagcttgccctcgacacgcttgggcttggagcgggtatggagccagtacttgaagtccgactcttcctgcttccgctccatccattcacgctggaagggagtcgggttgtagagcgccagcttgtcgctggagtcggacacggtctgggtttccatttcgtcacacatgatctactcctctgttatttcagcctccgattgaggcaatcaaactgtaacggagttctttctgcaggacaaccacttcgtgaaggttgcggagtccgctgatctgtgtttggaaattacgaccactccggtcccgtttcatcaactcctgagccacgggtcctctctaccaactccttgaccagcggcttgacggtgtagtaaaagagcataggtctctgtttcatctcagctgcattgaggcgcctttcctctgcgactgcttcttcctttgtctcgaatggtccctgcacggagacgatgttacaacccactcgatagtgttcaacgattacgtatgccattgtcttagtcccatagtccgctgtgtgactcatctttgaaccactgcttggcacgttcctgttccgactcggtcatgagtgggtatgctgcattaaccaacccatgtctcttgcagacaagattctgtcttgctcggatgctgctactccagtcccataggatgggtcgaagcagttggttgatgtattcctctctgtagctcatagcttctctgcccattcggtcattgcggttacgatcttatcaatgcggtggtcgtagaaacctgcgcagttgatagtgttgaattcgatcaccttcattccatcctctgtatcggcgacgtccataacacagcaaggatgaggcaaccacttgtctgcgagtgcctgagcgtgtttgtaggcttcgggatcgttcaagtgctcagacatgagccgtccgccgaaacggtacagtgaaccatcgatcacctttccgtcgacaatgaaccatctcgactcgcagtagatgtgctttactgcggctacgatgacctgtgtgtcttcaccaaactcaaacgaaccagaacgaggactctgcatccagtctcggatgtctgccgtatctgcgacagtaccgttgaaggctttgagatccttgaccggacgaatgaaccacttcttgtcgtcggcgcagtctcggaaatagcgattcagctctttgattgtcaggtgaatgcaatcgccattgagcatatcgtcacgttccgcattccatcggatagcgtcgaaacgttcgatgtcgtagcaattgcctttccatttccgctcgttggccatcttcgccaacttgactgagccgtagggaatgatcactgtgtcgtccgggatgttctcatactcggattcgttgccgaactctagagaaaacggaatgaccgatgcttcgacggtctgacaacccaatgcctttgctgcattccatacagcctcagccgtgtgatctgctactaggtttgtctgtactgcccatgtgactttgttcattctgtctctacccaaaagtcaggaaagaaaatccaaccatttgtcgtaacccaatgcccatactccgcatcccacgagcagaccttgaagcttttcttgcgtgtcgagacgtctatgtgaccatacatcgtgatcagtgttccgtctttcggcgcgcctttgacttcttttatatccataattcgctccttatgccacggcaatagccaggtttccctggctaccaccaacccctactacgaggtttttacttgctggtcagcttgtcgatgacctgcttgcctacgtccgactgtgccagaccttcgagcatgccggcgatcttcgtaccgcccttcggaccgaacatgtccaggacgttggtcacgccttcgttcgggttgcctgcattgctgatgaccttgatctcagcaccctgcagagccttcgcaccctcgacaccgatcttctcgctggcctcgacctgacggagatcaatcaggtacttctggtaaccctggttctcaccgatttccttagccagggtgatctgtgcctgcaccggcgccagctgcatcgccttctcagcttctgcctttgccgtaccctcagcctggataccttccgcgttcagcttctgagcagccaggttaccttctgcgaccagtgtcgtgcgctgcttctgtgcttctgcgttgatcacttcctgctggcgctcaccttctgcctgcacgatcgcgacgtccttgacctcgttcgccttgaccacggcgaccttacgctgaatctccgaagaacgagttgcctcgacttccttgacttccatctgacgaacagtcgtttcgcgctgagccgtcagcacttcctgctgcgaactttccttcgcgataccgaccgccttttccttctcagccgttcgctgaccgatagcctgttgggcttcctgatcacgcagctggaccgtctgggctgccgcaatttccgcagtctttgcctgctgggtgttctcagcaactgcgacacggctatcacgttcaattgccgaagtgcgcttggccatgatgttggcgatcacactcgaacccttggcatctcggatgtccatcagctcgatgttcttcaccggctcgacaccccagtttttcagctgctcgccgacttccttagtgaactggtcaccgaaggtagcacggtccaccatgatcgtgtcgatttcatgcgaggccagaatggttcgcaccgcaccctgcacaaccgaagtcagctgttccttcagttcatcgaagctcgacactcgctgtgccgcaacgttcgagtctgcgattcggaagaagctcgtcacgtcaacaacgaacggaacacgttccttgtcgtacgcctcgtatgcgctcaggctcaggtcgaagaccgacacaggcaggatgattcgcgtcagacccagcagaggaatccaggaaggccagttgtagtaagtgttgccaccgtcctggtccttaccgtacgaggtctgcgacttcgaacgctggagcgtgtgtacttcattcgccggaacgacgacacgcaggttcagcacccagaagatagctgcaactgccacgagtgccgcaatgcctgcaccaatgagaataaacatcagatcagatttccttctttatcaatgaattggttggttacgttttcaataacgccaggtacgtaaaagacctgtacatcgtcgcacactcggaagtagttcttgaagtcccaatacccttcgtccgggctagcgagcaattcctgcataagagagctgaagaagtctacaaactgttctgccgcttccaggttcgcgtacttctcatctcccttacgtggatcattataacggagtgccaactgttcgtcatacagctcgatctgctctactgtcggcagcgcgtcctcggtaccccaaagtttcgcagcgacctccggatacttttcagcagcatacagccacaggttgaacagttcaaccgtttcgttttcgtcgttgccggttaccttgtacggcaggtcggtatcgcgcttcttgtagcgagactcgaacgccttcgcgagcagcacatagaactgtgcttcatctttcgtcaggccagaaagaatttccgtcttgtagttgtcggcgtcgttttcccacgacagtacgtgtacctgatagccgggcttgatgttcttgctcatttcagtccttgatagtaggtcttgagttcttcgaggaactgctgtttcctcaacagagcctcagctgtgttggcgatcatgcttccgacgaattccttcggaggaatcacgtcgagttcgatatcgtagctgtactcacagtgaatcgcccaggtctccctactgtggagaatttcgtaccaggcgtcttctttgtctccattgaagtcaccttcgaaatacttccactgaccccagccgtgtccgcctctaccactgatccagtatcggttgaacttcatggcgcagccttctcgtagaagcgaagagtgttgtactcatcgtcgctgatacgaacgaccttcgatgccttggcttcctcttcggcgaggttcatgatgcgacgaagctcagcacgatcatcatcgtaccgcgagaggtgcatacgccaagtaccgaaaccccagccatcagggtcagtccatgtctttcgctcttcgatccactcatcaaacggcaggatcgtttcgacttcccagacacccagcttggtcagccaacgattgttgcgtcgcttgttctcatcgacgtgccactgataacggtcacctttgtaggtgtcaacccatgcttcatgagcacgagcattgacaccttcacgagcccgctttgcgatatcgaagatgaagtcagcatcgaattcacgagtagccattagtagcctcgctcgttgtatcgcttagtacgctcttccttggtcagcacacggacaaagtccacacgctcggaatagtacccgtttgaggaaccgcgccaggtgatgtgaacgaattcgcgctcagtgcggatgcggtagaaggtccaggtgacagaatcgtactgacgagtttcatcactgttggattccacagtcgcagaacggatcggagaaccaaccagcgcgtgaacgtcaccatcaatggcgtcgatgtagacattctcgcagcagttctgctgatggaacatcacgaagtgctttccacaggtggtgtggaagtcgatctggtcgttggtcttctctacgcgctcgagagtcagaccaatcaagtcgtcgagcggaacatgctcaaatgaatcgtatcgcattgtatttccttaccaatcgtagttgaggcccttggtcgggttcttaagaatgctctcacgccattcgtggaagctctcttcagtgtactcttccttgcaaccgaaaatggactcatagagatcgatccactcgacagcttgataacgctcgtagccgaggtcatgcaagcgctcttcacgggcgccatcttcgatctttacgagcatgtgcagttcgccacagccgtagtcttcgaattcgaagatgatgtcttccttgcagaggcgcttgtaggcagcccatcggtctttgaaaggaatagccttgttgctcagttctttgatgacagactttgcagcgtcatcagcaacttgccgaagagaaatcacggcgtcaattgcttctttgttaagagcggtcattacgtgtcctgaaggctttggcagcttgctcgagagcagccgtacggaagagggtctgtgcgatgttgagtgactcaatgccaggaatcaggttgagcatggacgcacactcgcgaaccacgcccttcgatttcaggatgccggtttcagacatcctggtcagctcatgagcaccctcagccagatttgcttcggcaaatttctttgccgattccatgatccggataatctcgctcactggcagacgatcgtgttgccgttggagtccttcatcagcactgcgccttcgggagacacgacatacttctgaccgtcgatacagcgagcctcatacgagacctcagctgccgggcgagagatgttcgacccaccactagcccaggtcttgaatgccggaatggcaatcgcagccaggatagcaatgatcgcaacaacgatcatcatttcaatcagcgtgaagccttttgcgttcgaattcttcatagcgttcaatgtaagcctcataatgttgaccgtgttgggtcttgaatttggaatcgagatggtctgcttgcttaaagtgacgattggctttcgcctcgtcgtcacgatcattccaagcgttcatcagactggcgaacacagcacttctcactgcctgcgccaactgatatgttgcgaagttcattttgctacctggatgcagtacgccttactttggattgtatagtaatagcccgcttctaactttcgtacttcctgcgaaagatagttcgcctgttggaggcaaagttctttcgtctctaccggaatggtggtctgcgaaaccgaaggtacacagcctgtacctccgcacgttggtttgctgatcatcaccagaacgagcgcccattttgccaggatcattcgccgtactccaggcgaatctgacgcgccagcttggtcaggaattcgtgctcaccgccgtagtcctggaaagaaagacgacggtcttcaccgttgtgaatgcggaaagaactgccgtgacccttggtctggacttcggcaccggtcagtgtgaacggaatgtagtagcggtcgtacgccttgtcgtactctaccttgggcagcggtggaaagatctcgtcgagaatagctttcgcttcttcagaaaaatcgcactggtctttgccttgggcttcgagcagagcgtcggcgaggtactcaatcttttcttggcgtgttctgttcatgttcacaatgctacagttcgcctacgaaagaacaaccgtggtaaatattcgtgtacctccaaggactttgtaatggcaggctttaaacagacaattatttcgcacgcgccgaagatgtttcttacattcgacggtgatgcctacgatccgaacagccgactgctcacggctagccctcaggtcttcattgacgagtcgggcttcaactccaacatcatgctgcacaatgagtcagaagtctacccagcctatcgcatgggtatcccttctctgattgacattgagcagacagatcaacgtagcacatcattcggttggtatggctatcagccgcttgcgcctacccgttggccaaagtctttcgtagaagtgcagcaccagtctcatcttgctctcaccgcagagcgaggttcctacactgttggcttctttgtcaacaaggcagagaaggaagacaagtggcgcgaccaagaacgcatcctagggttcaaccactacacacagacactcaacaagcgcttcatccgcaaggctgggtcgtttgacgtctacttccgtgactattgggcagctgccgaagagattcgtttcggttaccccggtggcggtgagattgtctgggttgtgcctgattggttctacggcaagaagaacttcgttgtctgtacttggaagatcacggagatcaatcctgacgtctacctcaacgaggcctatctgtacgtcaacggccatctgtatggcagctattcgacaactacggctggcactttcccgaacagcacaacaaccactccaatcgagatcgctggcgtaatcaactcttcatcatactttgaagaccgtcagacgagcgacctgcaactcgatcagatgttcatcctcaacaaagcgttgacccaggacgaaatctgtcgcttgtatagaaagtctaagtcgtacgacaacatcgcagttcaggctcaggcatcagcatactggccaatgacagatgtggaagacccagcagtcttcacgattaaggatttggtaggctacaatgacggtgtgtatcttggtggtgtggcacgcgtagcacgacagcagactgctccgagtcctatcctaggtggctcatctgtctacttccacaatggtggtatgggtgcagcccacagactgacgaacgttacaacctatacgccagtgttcaacttcaatggtgactggactgtagacctttggatgcagttctcaaacacggatcgttcggtactcttctcctgtcagaaggacgactatccgcatggtggtgtgctgattgaagttaatcgccgtaacaacaccaacgtgccaggacacatccaactctcagtgagtcaggagttctacgtttcgtctcttctcaatcgagacaatggtcagcctttcaacttcaatgatggtaggttccaccacgttgcagcagtccgaaagggaagcactgttactctctggattgatggaatcaagcacggttcggttagtgcgcctgttcagagtctttccaacccaggccccggtcaggtgtacttcatgggtgccgctccaggcagtctaaataccactggctacatgtctgcggttggtgtctatccttacgctctggatgatgctgagattagactgcgcaatctttactcgttgatctatcgtatccaaggcaatgtcacactgcaaggtaacccttatcgtgctactgtgcgtgctttcagtcatagaacaggtgcgttgattcgagagattgagtcttcgacatcttcaggtgactactcgatgacattgtatgacaactctttgattgacctgatggtcatgaacaagcaagaccctaatattcgctatcgagtctatggaccgattgcaccagctctttatgaggatgttccataatggcagttacccagtatctctacaccgacaccgacgctccagttctctacgggcagcctggggctttcatcacagtgctgaaagctgttcttgtgaacggttatggcaccaagcccggtatgggttggacgctagagtacgagtcaggaacgatcgcggtattccgtaactcgaccgctgcgggctcgacaggcatgtacctgcgagtagatgactctaactggcagtatgcgattgtcaaggcctacaagacaatgtcggacatttcgactggaactgatgctattcctggcacccttccatcatacagcaacacgaatatcttctggcctaagtcagcaaacaataacaacaacgctatcatgtggaacttcatcggtgacgagagaacgttctatttgaatatttgtccttggtcaagccagaacgctaatcagtttgcgaactatgcgtatatctacgctgcgggtgattacgattcctacgttcctagctttgctcataactatttcgtagcaggaaattatgacggtggctattcatcgaatggtccttgtatgatcgacgatcagagttcctacgtatgctgtgctattggacgtgcgcaggacaatgtcgctgacaaatactccaaggcatgggtaagctacatggcaggtggtgtaccttccggatcatacaatcatcaagcgttctcagtctacacaggacagagaatcttctatcctgcatatgtgatggaaaatgctgtccagaccaatatcacaggtaagtggcgtggtttgtacggaatggtaggtcgctcaaacttcacatggaatgagaactacggcaagctcccaaacaacccaaccggtcctgatttgattcagttcacagtttccaataacagcagtcagggcgtctatatcttgaacggaggctggtaatgacaattttgattgagcctgcagtattcaagaaggaaggaacatacacttggagcgataggcgcaatcactaccttgtcatggatggcgagttcaaaaagagaccaaatgatatcggcgggctcggatacatcgcgggtatgctacctggaatcgtgacagtagacggcgcacccgcatctagaacaattgaacttcgattccgagatggtcgtaaggaaatctttgcaagcacggtttctaaccctgtaaacgggacctacctcattgacgacctcaacccaaagctcattgttgatctcattgcaagagagaaggaagacggagtctataacgatatcatcttgtccaagattcgcccatggacagactatcaaatgtacatccatggacctgatttccctaacgttcgaatcaagccaattttcaagcgtgtgtttgagctcaccggcggagtgatgccttatcaactcagctcagatatcactattcctgaaggaacagaagtaacgcttgatggaaggttcttgacggtcgatgttactgcacctatggaaacagatctgtatatcaaggttcaggacacttcagggctttcggttgaaaagaacatcactgtcagttcctctaattcgattgtatctaagttcaccggaaattggatcctcgaaaacgaccctgtaacggacgaaccaagactgaggtcaaatcagattccgcattctggttctacatcttcgacttgggcagccgacaagaattacacacagatgtcgttccgtatgttctcatcttccgaaacaggatacgatattttctacctatatgtcaacgattcggaacgtgctcgtgttagcggtccaaatagttcctacaactacagcacgcctatcaatgctggcgatgtgattagagtcacctatgcaaaggatggtagtgcaatcagtggtaccgatgaagcatgggtgtatatcgacggcgtctaaataagacgaactcaagagaaacaacaaatggcaaactcactatacgctaaagcacgtcaacgattcctcgaaggcgcaatcaattggaacacagacacgattcgtgctcttctcgttgactcaggtaactacactgtcaacctggctacgcacgagtttgtcacctcgattccttcaggtgcacgagttgcagggccaatcaccctgacagctaagactacgactgatggtgcagccgacgcggctgacgctgtcttccctacggtctctggtgcaagtatcgaggcagtcgttctctacaaagacacaggtaccgaagcgacttcgcctttgatcgcttacattgacattgcatccggtcttccagtaacgccaaacagcggcgatatcaacgttgtttgggacaatggtacaaacaagatcttccgcctatgaatcatctcttcgcataccaaccatacggaccataccctttccgcggtaaggtaatgatgttgcgtcagaaccttgagcctgtgattgacccaacaatcacagtgaattggaacggatatactcaggattaccgctgtcagatgaagattgcgcctgaccagaccaagggttcttatttccattctgcaagtggttcggctgtccatagatatttcacagtcactccctcaggtctaactctggtaaatgcaacagctgcatttgcaggcgatgttaatgactcttttgtcagcaatgattactatggttgggtagggacatcttcatcgtatatcaatgccttccgttggtcagaccacagccttatcacattgacaaagactggtctaggtacggtgtatggatgcacaatcaatccggtgaatggataccagcttgttgtcacacatagtgccacacctttcattcgttcttatgatctaagagacggttcgtatgtggatggaggggtggtgggtgctaactatcaatcttgtacctggacacctgacggtcagacggttgttgttctttcagcgtcgtctccatacgtctccaagtatagcgcgaacctagcaacaagaacaagtatttccacaaactcatcgtatggtaactcaacaagctatatgtcaggttatagctcttcatacggtcagttccgaggaattccgcattggtctaaatcaggttccgtcatcatggctccgggctccacgtccacaccattcctgtttgaggttgacactgttacaaacacagtgattccgattgctacaaatgatagcgcatatttgtatggtgctgcgtacgatcctaagaacaataaaatctacacctaccaaagccctaacggtctaacgaatagcccattcaggcgttacaacggaacaacgtatgccgaagagcctatgtcctcagcgtcatatatgatgaccggcggaaactcctcaggttgttcaactgctctgatggtagtgagttctaacactggtacgatcacaggaacagttcgagacgtcaacaacaatccggctgctcgtaagatccgagcatatcgtcgttctgacggactgcttgttgctgagacaacctcagacggaacgaccggtaactacacgatcatcactccaacctcagacactgaggcatacgacgttcagttcgttaccaacaatggcgagctattgaacgatttgttctacgcacgcaccacacctgcagcggtagcataatgccaagaaactttgtaactgtgaacggcactgtcaacattgatggtgctgctcgtcaaaaggatatcacactgttctcttacgggaacggtgccaatcctacctacatgactaaaggcacaagcagcccagtagacggaacgtactctatcatcggactcaaggagcgcggacagcatatccttggcttagcatcatctgattatggtcctacatggctacctggaacagcttatacggttggtcaaacggtactccctaagaccgctaacaaccactggtatacttgcacaaccgcaggtacctctgatacgattgagcctaactgggttgttggtggagacttcacgattgagtgctggttgaacagagcttcagacaacaacatgtctgtcatctcaaagctaggccctaactacgatggatttgcttgcatcacacgtggtggtgcagtcggttttatggtcaatgggtttgagtacaactctgctcctaatgcaactgcaagcagcacgtggtatcatgttgcctgggttatgaccggaggcacaatgcgaatctatgtggatggtgccattgttgtagagcgtgctgggctgtcgattcttcctaatacctatgatgtggtcattggtgcagacaacggaacaggtgttcgcgctaacttcttcaatggattcattgatagtgtccgaatcactaagggtgttgctaggtactctggtaattcattcaatgtaccaacaaaggacttcccttccttcggaccagttgatcctctgtctcctgagactaagagcctgatgcggtttgacggtgttgaaggttcaaccacctttgaagatgagaaaggctttacctggtcagctcaatccactgttgctctacagacaaaccaatacaagtttggtgggtcgtcggcatacttcaatagctcatatgcgccatggatgaaggttgattacaatgctgattttaacctcaatggtgactggacgattgagacattcttccgtcttgatggaaacacttccaatgtcacacctcacatctttgaggtaagcaatggccctggccaacgtttgaacgtctatcgagacaaccaaggcaacctgtcgttctatacagagtacaccaatggtgcttctggcgtccgtttgacctatccaatttctcctgacacatggtaccatgttgcacttgttagaagttcttcaggtgttaagatgttcgtcaacggcaacttggttggtacctacacaggtgccgttattcctgctgcctcaactgcacagatctacctcggaaactactcgttctctccaaacaccaacgacggtttgaatggttggatcgatgaattccgtttcactcgtgcagtcagatacacatcttcgttcactgttccgaccactgcatacccccgagcaggtggcgacccgtcctataacaacgtatcgtctctgatcaaattcaacgattcaatcgttgatgaaaagggtccggtttggacattcacaggtgacggcggcccgagacaatgggcgtacaagttcccacctgggtctctctaccttgttggtagtggttcgatgtctacaccaaattcagatagcctcaatctagtttccaagactagtttccctgatggcactgcaaagtggattgacagcggcgcaacggagtcacctattgcaagaggaccgttccagattcctgatcctgttgcagacacgagcacaatcttcctatctcgcaatcacgaactgcctccacaggaagagatgacagcagcaaaagctgtggtatatggtgggtgcacctcggttagcagcaagtttgccggatacaacgcgatcaagtttgatggagccacagcaggtctctattatcctgctgtggctcctggttcaggtgattggactgtcgaaggatggttctttatggatgccttgtctccatcatcttcgcaatgtgttctttacatcggagatattggtagcaacaaccatcgccttcagatggggcctactgctgcgaatggaatcgaaggttacgtaagtgcaggtctcaatggtggtacatcttcattcgccgcatcgaatcctgtatcaggtggatctcttattcaatcaaacacttggtatcacattgcttttgaaaagtttggaaacaatacatacctgtatctgaatggaacacaggttgccacagctacccttgtagccaactattggatggttcctgcttcaaatgccaacacctatatcggtaccggtcgagttgcaagtgtaacaagattcatcaatggcagaatcggcgaagttagagtgagcaacattgcgcgctaccaaggcgtcgcaagcttccaaattccaacggcgccttacacggtttgaaacacggttaaatatctcagtctatagggctgatatcttatctgtgttgaacgcgctatctgaaaatctaaacgacgccgcaggtagcttcgatgccacttgatttcattgcgtctaatctaacccataccaaaccagtaggaactctggactttgtaagcccggaaggaatgctatttggtattgagattggtgatggtggcgagttcaagattgccggcgcacttacaggacaattcctccaagcttcttggggcggtaagcctgtctatggtcatcccgctcatgttgttgaaacaacctggggcgacaagacatacatcggtgcaggtattgcacgtcgtagccatgtcaatgttcctaccattgtccagcaacagatcatcaagcctgccggttttgatcagtcagaattcggtgtagttcagaccaacccaacttccaagtatgttcgccctacaggtggacagatcgatacaacttggttcggtgcaagaggatactctgctcctgtaactgctgttggtgcgtcttggtctgaccagattgtaatttctcctcttgcgattgagtcgacgctcaccttcggtgatgcaaagatcgtccctgaacagaacattgaaccttccggttgggcgtcaactcaattcggtaacagctatgtcttgcattggtacgagtacgctccgccaatgtggactcttgatggttcatgggctggtaaggacgaatactttgacgctaaggatggtgtaatccatgccttgtggcgcccacctgcagattcacagacaatcgctcctattgcattcgttgatagtgcaatgggtagtccgcgtgtacgtcaagctgtaaagcctgagggtattgcgtctactgtcaacttcggtatcgctcagctattcccttcgatctgtaataactggtcgtatcagggcgcaaccaaccgcattccgatcacttttgccaatgttgctgaggcatacccaggcaaccgcatcccgattgagttccgttgcggatcgtcaggaattcgctactccgacttcgaaggctttatcgaagcgcgtgatggtgctgaactccaggtcaagatgtatgacggctatctgtcgctcaacatcggtgaaggtgctactctaagtccaattgatctgacgacacgagtcagcatcccgctcaacttctatgatggtgcgagctggattggtggacgtggttgccttgacgtatctggtcttgtcaacgttggttcgagcggtaacgctacaccaagcccaacactcaactctgttcgcctccagaacagtggtgatccgaccattggttcttcggttggtactcctctccttgacgtatcaggtcaagacacattcgagtactcatggacacagaccctcaacggtccatggtacgacaacgactttacagatgcgttccttgagttcggtgtattcttcaaccgtcctcatagcaccatcacaacggcaaccggttactgggaatacggcactccgttcaactccaataattcaccttggctgagcttcagaatccctcgcgatcctgaaagtaaaacagtcccggtctatgcgcgcgttggcaatgagacaatcaccctccagccatttgagaagccagctggcctcgatctctttgctggtggtaaccgtcttcgtgttcgtttcctacgcaacggtctaacgcttactcttgagatctactacggcgatactctgctctcgaggcagaacccgcctgtatcctggccaacaagcgttgtccctgtttggtactaccgtaactacaacaccccatcctcgtacattgaccttgcaaacatgctgggctgtacggatggtctgctgacaacttacccagctaccaacttcaacttcggtgcaaacttctacgatgggcaatcggttgcgcttgatctgtccacgtcgacgatcctgccaatcaatagcttcgccgaagatgcttatctggctgcggtacttgatacacgtcctgtcgtaacattcccgatcaacgtctatgaaggcgcctcagtcgacctagcactcaacaccacgtctacgctacagcctgtagcatacgatggtggtgtgttcgactttgatatcaagatcaacccatctgcagacctcctgtttgcaatggcagatggtgcttcagcttcgattggtctgtcaactgcattgcagcttggcgcagtcagcatgttcgaaggcgcggcagtttcagcgtcgcttgatacactcgaaaactactatatctacgatggcgcgttcgtcgaagtcggattctcgactgaaaccacgatgccaatggatggttacgctggcgagtcggtacaggctacacttgatgttcgtccatcacaaggtatcggcactctcggtatctatgaaggtgcgaacgttgtcacgtcgttcactacgctgcctcaggtactgctgtatccaaatgagatcaaggatggacactcgttcaactatgacatcctcggctttatggggattgacctcaacaatactgcttgctgcccaatcaaggacaatccagcacgtattgaactgactgctggacctgcaccagatgagcgttacgacggcgacaagactgtcttcactgctgaactgtccacactaccacgtttcagcctgaatgtctacagcggtgagcgttttgactctgttgatcctgagtacctgacgttcaacttctatgaaggctcaggtgcaatcgttgatcgtgtcgagtacagccgttacaacttcaacctgtgtgagggtaacttccttccagatggcgatcacgtcaacgttgagcttgtcgctaccgattcgctctgcaatgattcgactctcatcttcgatggcggttttgttgatctcgacattcagaacaatgtgcagtttgctgtacctctgcctacaggtgaatacctcgatgcagtggtcacaatcgacaacgcctggatcatcaacttcctgcacggcgaatatgtacgtgtatcgaatcccgaattcccgctcaacttctacggcggcgaaatgtcatccgctaagtttgaagaggaagacatctacggcttctccggcgagtatgtttcggtcaacctgtccactgactacgacgttgagttccttgaagtaggctgccttgacaacgagtttgttcctgcaaacgagaacggcgaccctgattgggacaagttcaatcctgttccagttgagctcgacttcttcagccactcaatcaaggctcgatgcttctaagatttctttagtaagtaaccagtaatcaaagaaaactttacaaatggctacatgtcttgaatcaattgctgcgatgggagggattggatctctgcaggagatcttccctaacactgtcatgcctttcagcgtgacatcgacggctaacaagctgtttaggctccgatcgcctcagttccagtctgttcaatttgcattcaaccttgcaggtaactcctggaacacacagatgacagtgttcagttggaacggtacaacggcgaccgcaattggttcggcgtctatcacatcagcttttgtcagcgttaccattgacttccctgtaggtgattacatcatctgccttcgaccaggaactgcaacacctcagtcgggaaccttcactgcttcattcacaggctactcacagacagcaaatctcgtggtagatatgtttggtggcgaagagtactcatgcatcgtttctgatcctccaagaccgccacgcgagtgtaatgaggctttgttctttgaggttctcgaaggagaactcccacctggcttgcagatggattttcagggaacaatcactggtcttttgccaaacctcgattgccttgaggacacacctgcccctgctgtgaactggtactttaccgacaacgacggtacgtcatggccttggggtcgtcagtggagattcaaagtcaaggtatgggtcaatggtctgaaagacacagccttcgatgaagattggttctgtgtcaagatccacaacaactggacattcgaccttgacaacttcatggaacagagtccattccaaagagtggattatgtccgtgtcgtagagccaccgaagccactcgaggttgagtgcgcaccttgtgctcagatggaggaagtacagttcatccctcagccaattgacgctgtctgtgagccttgccaaaactctacggttgccaatcaggttgagttgattgcgatcccggttgagcttgcaggtatcgatccgaacgatgtcgtcacctggtatgacttgaacaaggacactgtcttcaccaacccataccttgagaagttccgtgatgatttgagagactcacaagttttcaagatcatcacaaactatcgagagaccaatccttacgagagcctcgagtacgctgtagcatccaactatcaaaactatctccagcttgctgagattcgtcttgatcctacaacggatccaaacaacctatctgttttgatggctcaatggcgtgactacatgaatcaatcgctgccaaccacaccaattggatacggaggagagactttcagtgtcaaccttgcctgatcaatgcgaaccgtgtcctgtaatcgagccgtttgtgcctgttgccaaactgccggacgtgctttgcccttgccctgaagaagtcgaaaagccttctattcttccaaccatcacgacacaggaagtgatcacctattgcttgaaggacgcacttcacgcaatggcaacacaattattctgtgatcttaacaacggtccaaagggctgtaggtaaatattcaagatatgggactaccaacttgccgaatgacagatatgactatgggtcacggatgctatccgccccagaaggtcttacaaggttcacctacggttttcatcgaaggtttgccggctcacagagttggtgacgcgatccagccacattgctgtgatcactgtcatcctagctttgcggcaatgggttcctccacagtctttgtcaatggacaaccactcatgcgaatcggtgattctgcaaactgtggttccaaattgatgacaggcgcaatgacagtattggcaggctaatggctgagaacaaaatcttttccgacctagacttgagcatgatcccgaatcctcatacgggtgacctcatgcctaaggtgaatcaagaagctatcaaacgctctgtaaggcatgccttcaagttgaacgcgtatgatatcccattcaacaactcaatcaagtctagcctgaagcactatctgttcgagcagaacacccagctcacacgcgctgcgcttgagactgatctccgatggctaatgaccaaagtcgagccgcgcatcgaagttcagacgattgatatcgttgcgcctaagaacaaagatggctttgacattaccatcacctacaagatcaagtcgatcaataccatcgactcgtttaacctgattgtcgagaaaatccgatgaaaaacttgcctgtccagtcgcttcaatttgaagacatcaagactaacttcaaggaattcttgaagggaaacgatcgatactctgacttcaactttgaagcctcaggtatcagcacgctgctcaacgttgcgtcttaccaaactcactacattggcttcttcgtcaagatgctccttgatgaagcgttcattgactcggctcacactcgccaggcaatgcttagccatgctaagaagtcctcatacgttccaaagggtaagcaatctgcgaaggctgaggttgttctcacgctaaccgttggaacaaacaatgagcctctgagccgtaactatccgattgaacgtggcgctactttcaaggccacaaacgatacacaggaccagcgcatcttcacggtgcttgatggttctactatctacaatcgctcggttaccggttcgactgctacctatacctcgacgcctctccgaatctatgaaggccaattccgctcctggaacttcgtagttgatacgagcgttcagaaccagcgtttcatcctaaaggacgagatggctgacgtcgatactttccgtgtgcgcgtgaaggagaatgcatcgtcgacagtgtttgaagagtacaccattgcatctgacgtgcttgatcttgatccgacgtccaaggtgttctttgtctctacggacgagaacggttactatcagatcttcttcggtaacggcgtctttggtgttcagcctgaaaacggcaacgcagttgaactgagctacatcagcacaaatggcgagacaggtaacggtgctaaggcattcacctaccagaacgatattcagaatgttgtctcgacggtaacgaccaattcggtttcggctggtggtatggaaccacagacgattgaggaacttcgattcgctattccgaacgccaacaagcgtcagaaccgaatcgtcatctcgtctgactatcgtagcatcctccttgacaagttccgcaacgtcgattcgctcaacgtttggggaggtgaagagaatgtgatccgcgactacggtaaagtctatatgtccatcaagcctaaaaactcggacaagctgacttctcttagccgcacgcaaattcgtcaggatatcgtcaagaagtatggcgtggtcggtatggacgttgtgttcgttgatcccgatttcatcaacgttgacctgtcaatcactgctaagcttgatctccgtaagacgactcgctcgcagcctgaactattcaaccttatccttgaacgtgtcaaggagtacaacgagacctacctgtccaagtttgatagcatcctttccgacgtcgatctcctgtcttacatccgacagggtgagcctgccattgtttcgatttactcttcaaagattctgtctaaggatcatcagcaccttcacaactccactgcctcgaacaatgtagtgtttggtaaccgactggtcaagggaacaatcgaatcaggtgtgatcacctatggcactgagactgtcaagttgattgatgacggtgcaggtgttcttaagttggttcgagtctctgatagttcagtgattgtagctaaatcaggatcggttgactacaccggaggagtcgtaacctatgcactgcctcaggctgctaaggttgctggctatgagacaagtacatcaggtgttcttgagttccgtgcagtcccttcggttccagacatcaacaccaacatgaacaacatcgttcgtatcgaaaccactaaggtagccgctggatgagcacactaatcccagtactcgcgcataagcttccagagtttgtgcgtgaagactatcctaatttcgtacaatatgtgcgagactatctggcctggatggaacaggacgacaacttcttgggcatcattaatgcctggaaggaaaacatggagccttcgcttcaagtcgagccttacattgatgcaatgctcactgacctcgggttcgtctcaggtcagaacctcgctgtagacaagaacctgttgatccatctgttgcaggacttctatctcagccgtggtactgaggcatcgttccgatttcttttccgaatgctgttcaatgccgacgttgagattcgctaccctcgagagcagatgctcgttccgtcattcgctgagtatggtgagcgtcatttcatcttcacctcagcgaacaacatcaacatgcttgacttccaagacctcgtactctatgtgcgtgagaatggtggtacgttgacaggactgacgactaaggtaaaggcttcgattgagaacattcagatcgtccatggctcaggaacaccgtatttccgaattgagatcctccgcccgacatttgaatttcttgtcggtgaagctgtcacaatcatctcgggcgactacgctatcacggagtttgtgaagcctgttctcgcaattgaaatgaacactcctgggtctggctacaaagcaggtgaagtgattcagatcactggcgccaaactcaatggtaacgcattcatcgagagtactcgcaagggcggtgtcagtaatatccagatcgtatcatcaggtgccaactactctgtaggcgatctaattgttgctcgttctgatgatgacggtttcggtttctctgcttcggtcacacaagtcgatgctcaaggtggcatcacagggtataaggtaatcaatgaaggctacaactacgcaacacttcctaatctttatgctcagagtactgtcccagcgagccttaaggcgtcaggtggtaacgtgggtgcgatccaaactgtcaaaatggaaaacccatttgtagactttgacgccaccgatatctctatcgtaagcgctgaaggaactggtggtacattgacagctaaggctgtcagccgttgggagactcgcgaatggactgaccgaaaaggcttccttgcagagagctcaaccctgattgactctgaccgtgtgcagcagttctcatacacaatcgttagcccaatctcatcaagcctttacgacagctttgttgcagactatctgcatccagtcggatttgttcgttcaagttcctacgagattgtttctaaccttggcttaaatatcacaagtggaacgcctgcaattggtactgagactccaatcgtgtatccggcagttctaaatctcacgtttgtgtctgagtacgattcgttcgagaccatcacactcgtaacagacaccggtgacgagttcggcaccaacctatttgaaccaatcctaattgattgaggatctaagaaatggcttacagcttcacgccttctatcaaaccatatgtgatctccagcttgtacgaggccatgaagtctgctcgcccttcggctagaactccttcgacttcctactcgcttggtgcacaggtttccaacggaaataaccgctacatctgcatgcaggaaggtgtcacaggtgcaggtaacggtccttccaacaccactggtgcggtctatgacggcacggttcgttggctcgcccttggtgcagacaatgtccaggatggtgacgtcatctctaacctctaccttggcgtaggcaagcagacagaatgggctaacccttctacacctgacgcaccagacacatctttgactggacagaatgaggcacttgatgacctcactgctcttatcaagattgactcttccaacctgcgacttggtctgaagaacaacacctggaccactggcacaatctactcgcagtatgatccggatgtggttacctatgctactccgaattatgctatcgttggcggcacctatgtctacaagtgcctcgataacaacaatggtatcgcatctactgacgcaccatctggcacaagcacttctctgatcgagactgcggatggctatatttggaagtatgtcggttcggtatcaggccctgagatgttcacttttggtacgaccgaattcgttcctgctcctaccgaagtcaatgttacaacagtgcagggtgagatctcgtcgttcactgatatggtatccacttcaactccgtttgctgctgctgatacgattcgcgtcgtagtacagggtaacggtacaggtgcatcaggtgctgcacgttcaacaacttcgggtgcatcaaagtctttgactggtctgtatgcaaccgcaggtggttctaactacaccgaagcctatgcgatcgcatataaggatggtactccaggaacaggcgcaactctggctgcgacaattgatgcaggcaagattgatactctgaccgttagctccccaggttcggcttacacttctgcatcagtggttatcatcggcgacggcactggcgctgaagcaactgtcgttgtttcctcaggcattatcacagcagtcaacatcactgaggaaggtagcggttacacctgggcaaaggcattcatcatcccaggtacggctggtggtgttgctaaggcaaacctgtctcctccgggcggtcatggttctaatctcgacactgagctgggcatcgcgtctgttctggtttcggcacgtctttcggcgagcctgtctggatacattccaaccgagcctaccgatactgacggttcgttccgtcaggtgactctggtttcaggtgtccgtggtacgactaagaacgcactcgcctacatcggtccatcgcatccggattttgtttctggatcacaggctaaatatctcaagggcagcgggtttgttctttacatgaacaacatcgtagctatcgaacacacttcctcgcaggaagaagtgatcaagatctcaatttcgctttaaggtaaccaatggctaagcttgacctaaatcgtgctccgtatttcgacgacttcgagccgaagaaaaactttatgaaggtcctgtatcagcctgggcgtcctgttcaggctcgagaactgaatcaggtacagagcatcttccaacaccagattgaatccttcgcgaaccatatcttcaagaatggttccaaggtaagcaatgcgcgtacctccttgcagtcgaaggcttatgtccgactgaccggaacgcctgttgtttctacctatcctgagaatactcgcctgcttggtgagacctcaggcatcaccgctactctcgttcgcggtgttgacgttgaaggcgacgatccggcaactctctatgttgtctatacaggcacagcaattgacggtgagacctcggtattcatcccaggtgagaacatccgtatccttgacgtgaacagcgttgaggtcggaactgttactgtccgctgcccatcatgcccaggttccggtctgagcgacactctacctccaacaggctggggtcagttcttcaccgttgacgaaggcatcttctatttcgagggaatgttcctcgatacgactcgccaagacatcatcgtggtcaagtatctcgagaagaatgtgagtggcgagatcgtcaacttctctccatgcaagatcggtctcgactttgttcagagcgtgatcacctatcaggacgacagttctcttctggatccgtcgctgggttatccaaatagcactgctccgggcgctgatcgttaccaggctaagctcgtactgaccaagcgcagctacaactttgaggatggtgaaaacttcatcccactgtgccgccttggtccaggcatggtcattgagttcatgaagactgactctgagtatgctgacctgatggataccatcgcgaagcgtacctatgagactaatggtgactacaccatccgtccgttcaaggtctcgttcttcaatgctaagaagacctcggctgctgatcctctgggttggtctgtcgatggcgatgaagactcgctggtctcggttgttactccttcggttgcatacgtaaagggttaccgtgtcgagtctatctccgacacccctgtcgtattcaataaggcacgagacaccaacaagctgtcttcctttgtcaagcacttcgatggtcgcagctacatcctcggcgtgcctaagggtgcaggtatctgggcaaacgcaaacaccggtggaatgatcaccgatgcaactgtcacgatctatgatcaggctaccacaggaaatgctgctgcgggttctccgattggtaccctgaagatcagcgacgctgcctatgtctcaggaaacctcgctacaaagaacgctacctaccgttactatgtctatgacattgcaatgaacgcaggcaagaagctgtccgacgctcgctcctttgtggttgcaagctctggcttctacaccaacgcggtcattgactcggttacagagtcggttgagatctacaatgcgaaccagactgcgctgatctacaaggttgatcgtgctaacgtcaagtctctccgttccgcagaagacccactcaacggcgcaatgaacgtcgtggttcgtcgaaagctcaacggtgttgctgacggatcgggttcggtcaccttcacaacttccgctaacgaatacttcgacaacgctggttcgtcgatgcttggttggtatgttgctggtggtgtgacgacttccttcatcccaggtccgctaaccgcgttcagcccaactagcattaccgtagcgctcggttcaggcgccgccggtgcatcggtatatgtgatcatcgacgtgttgaaaacaaaccagacagagcgcacgaaaacgcctcagaatctgactgttacaaccaacactgctcctgacactgctatcggtgcagaaattgttcttggtgtgactgacgcatatcgtctgaagagtgtcaagctgtttgttgaaggttcgcctgatacaccagtggcagacatcactgacgaatacaagatcaactctaacatcactgacaccgcatatcgcgagtccaagattgttcgtaccaaggctccaagcttctcgacgaacaactcataccgccttgcgatcaacttcgattatttcgagcacagcggttcacagggcttcttcactgttgactcctatgcaccggcacttaacgctgacgactcaggagtgacctatgagactcttggtggatacactgcttcgagtggtgttgtttatcctctgtctgcttccatcgacttccgtccagacatcctgggaacaaacccagtaacatctgttctgccagctaatgaaagcaccgcaatcttcgacattgagtattacctcgcacgtactgacctccttcagatcaacaaggatggtttcatctacgtaaagaagggcgagccttcggatgatccacgtcctccgaagactgacgacaacgcgatggcactctatgagatctggctttcgccttacacctactcgttgaacgacgttcgtaccaagttcatcgagaaccgtcgctacacaatgcgtgacattggctcgctcgagaagcgaatcgagaacgttgagtactacaccactctgactctccttgagaagtcggcacaggacatgtccatcaaggacgctaatgggcttgaccgattcaagaatggtctgattgcagacaacttctctgacttccaggcagccgatctgaccaacgtagagttcaaggcagccgctgaccgaaccaaggctcagctgcgaccaagcttcaagttgatgaaccgtaagctcgtgttcaatgcagctaagtcctcaggattccagctgtcaggcaacatggcacacctaccgttcactgagagcgttgcaattgagcagccttatgctaccaagcacctcagcgtcaacccatacctgcagtataaccaggctggccagatggtaatgtcgccaaacaacgacacatggtccgacacaacgatgcttccacagctcatcactaatgtcgacgccaacgttgaagcgatcaagaccattgttgaacagactcctgatcctgcaccaaaccctgttgttgaagagaaggttctggcggttgactggggtacgcacgtcgacctcaatactactgtcctaaataaggtagagactaagccagtaactggcggtggtggacgtggcggatcgccgtggcgcaacctcaatgtcttcacccgagctaactaattaaggctagaaatggcaactgtagaatcaagaactgatacatacgatctgggcgatatggttaaggacgtccagatcgtcccttacatccgtagtcgtagcgtcgagttttacgctaccaagatgaaggcgaacactcgcgtctatgcgttctttgacggtcaagccgtttcggagttctgccgagatattggtttccagcttagcgcgtctaatgctggaactgcctcgcagcttgttgagtttggctcgccactgattacagacgcaaatggtgagctccgcggtgagttcaagattccgggcggacgtttcttcactggtgagaaggagtttgtcctttcggatgacccaggactcactggcgatgcagacatgcagactacgagcgctaaggctgcttactttgctggtggcgttaatgtcacgaagcagaacgtcacactgaacgtagtttcaactgtcgtcatccctgatgcggtcaacccagcacgtgctgcacctgaacctgctccagcacctcctgctccggatccttcttgcttgaaggagatgaagaagtatcacccaaagaacttcaatgagatctgccaatgcgttgcaggtggtggaacctatggtgcctgcggtgaccctatcgcacaggcattcattgtcaacaacgatatgttcatcagctcgcttgatctgttcttcaagcaggttgacgtcttcagtgaccgtatctttgtccagattcgcgatatggtgaacggttacccaggtaccaacatcatcgctcagaagtactacagcccggatcagattcagccgttcgcgtctgatgattcgagcaaggcattcaaggttgttttcgatcagcctgtgttcctcgagtcgatgacgcagtactgcttcgtcgttggtggctattcgcctaacactcgcctctgggtctcgcgccttggtgaggaagtgacgaacatgccaggaaagattgttgagcagcagacgaccactgaggtcagcttccgttcgctcaatggtacgacctggaatgcagagcagtatgagcagatcaagtatcgtctctacaaggcaaacttcactcctggaaccatgagcctcgtattcgagaacgctcatgaagatgaggaagtgatcctgcctgaaaacccattccagactcagacaggtcagtcgcgtgtgcgtgtgttccttcgtgatcatggtctcaccacaggtgaccgtgtctcgatgagcctgaccagtgatacaccgttcacgattacgatctcggacttcgttccgcaggtcggtcagacgatgcacaccacaacaggcaagggtgtcatctcagacatcaagtcgacagctacagctaatcagtacgaagtgacactgaaggatatctccggtgtgttcactgcaggtcagacatactcgtgtgatgcaaagactcgcgaggttcgtgactggtatctcattagctccatcgacaccaagaagccagcgagctacacactcaaccagtgcttcggtacggttgtgacaaactcgtatggcgcaaagtatccaggtggaacgattgcaggtattcctgtctccgagttcaatactgagcacgtcactggttcgctgggtcactcggttgttgaagtttgctcagttgactcgttcatcatcaacctgacaacaccagctacgatgactggtcgctttggcggaagcggaatcgtttgctataacggtggtggtaagtttgacgtgttcaacgtttctggtgcttacctgccttaccgttcctctgagaactggacgcttacaggcgttggtcatggcgacaccggaagcctgttcgaggcagctaactatcagactcaggcaccaatcgtgtttgctccacaggaagacaagttccttggtcagcctcttaagattgcttcagcaaacaacgagcagatcatgctcggtacaggaaaccgttcggtgactgtcacggcgtcgttcaactcgactgatgctaccagcactccaatggttaacatggacaccttctcggcgatcatgatttccaaccgttccgagtggcaggacaagtcgaagatgacttcgattccatacgacgctacccagcctgtatggcacgctgaggaagagattgtcaatggttccgagatctacaagtatgtgacacgtactgtcaaccttgagaacgctgcaaacgacctctacctgtatgttgatgcctacaaggatctaaacgcagacttcgatgtctacttcaaggttcttccggtctacgcttcgggttcgattgaggcacgtccttggatcaaggcaaacgcactgaccaagtctcgttcttcagttgacacctcggatatggtcgagtataaggttgtcgcttctgagcactgcaccgcatacacctcggaaggagtcaactatgcaggttggtcagaagatccattcactgcattcaagatcaagcttgttggtcgttcgaagaactcctctaagccaatcctctttgagtcactaagagcaatcgctatcacataatggacgcaaaagtaagagactatccagaccttatcaagcgcggaggcggcgtggttaacaccaatcacgacgagtacctccgcgctaaggctcgtttgaaacaagcaaagcgcatcgacaatctagagagcgaggtaagggggcttcactcaaaactagacatcctgattggactactccagcatgatcaatctaaatgacatctcccttcgtctaatgtcgtatcaggcaactgtgcgacagacgattaccgccgttcagcaacagcagtgcagttctgacttcattgaccgtgtcagcattgccctaaataatatcgaaaatccgtctaggaacgaaacatggcaaaactcaactcgcgagaagagttcaccaactactgtctgagagctctcggtgcgcctgtaatgcgcatcaatgtagacgaccagcaggttgatgaccgaatcgaagacgccctagacctattctgggaatatcactctgatggttcggaactcgtattcctgaaggtacaggttactgagacgatgaagcagcagggttacctccagcttcctcctgagactcagtctgttctgcgcgtcatcaatgcaggctcgggtatggatggaggcggaaacggtatcgcaactatcaacctgcagtatcagcagtacatcaccgatatcatgaaccctcgccgcatcatgcaaggtgatggtctttcagcttactacatcactcaatcttacctcaacactttgaacgacacgttctctgctgaggacagaatccaattcaaccagcactacgataagctctatattcttggtgactgggatgctttgactgttggatcttggatgggcattgagtgctaccgccgtgtaatgcctgaggtttcgggcgatgtatggaacaaccgctggctcaagaagtatgctactgcacagatcaagaagcagtggggaacgaaccttgtgaagttttccaatgtccaactacctggtggtgttcaattgaatgctcaggaaatcatggatgaagcgaaggaagagattcagacgctgaagcaagaacttcacgacatgtatgaagagccaccgaatttcttcgtaggttaaatatctcgaacattaatcatttcgagaacctatcatggccttgaaccgctacttcaacactgcgaacgagaattccgaacaggaactctttgaggatctggtcatcgagatgatccagatgaacgggcaggacgttctctatattcctagagaaatctttgaggttgatcctgtccttcaggagccgaagaagactgtcttccgtcgcaacttcatcattgaggcttaccaaccggatggttacggctatccgggtgagcagaacatcatgtctaagtttggcttccgagtcaatcagactgctgacttcattatgtccaagaagcgtttcgctgagcttggaactggacgagagcgtccgatggaaggtgacctcatttatgtcggcaatccctacgatccagatttctctctgaccaatactctgtttgaaatcaatcaggtatggtacaaccaacctgactggcagtttggtcgccacttcacttacaagctagtatgtgagacctggactggttctcgtgagaagttccagaccggtaagactgcacttgatacaatggagacagtgtctgatgacagcgaggagccagcacgtgtcaatgaaggcatcatctctgcgaagaccggaatcatcgttgaccagtttgatcgccacaatccattcggtgacttctaatgtcaagacctcacttctattggcagacaactaaaaagctgatcgtggcatttgctacgatctttgatgagatcgaggtcactgatgactttggtcgaccttacaaggtacctttgattttctcccagaaagagaagttcattgaagccatctactccagtaagagtatgggcgagaccgacattgatatcacattccctcgaatgggtttcgagttggcgggtatgaactacgctcctgagcgtaacctcaacccactgaaccagattgtcgatcagatggatgacggtgaagaggtgatgacctacaaccgagtcccgtacgatctacagttcgatctctacattggtgctcgtaaactcgaggactctctaaaggtacttgaacagatcattccgttctttactcctgagctgtctgtcaccatccgtgatagagaggacttccagcttgagactgtggttcctgtcacattgaactcgacgtcggtgaatatcgactatgaaggaacctttgatacaaagcgtacgatcatgtggaccctaaacttcaccgtaaagggatactactatccggaccgtcgtgctaccaacatgatcaagcaaacgattcttaactttggtgacaaagattacgaaagaatcttctctaaatacacgagtacagtcacaccaatcgaagctggtcctaatcagattcacacggttgtggacacacatggatcacaattcgaggaataagaaatgacgtttgaagaatttctaggtgaagccatcaaaggatggaagcacgcacataacgaccttgcaaagcatcgtcgcgaacagtctcaggcaggaaatgaatggcatacgcatgctctgaacaagtctggtaaggaaagcggcatgcacgatgctcgtaagtcgcacgcatcagaatcagctgctcgtgctcaccatgaacagttgaagaagaataacccgaactctcatatcgcgcacaacctgtaccacaacggtaagcacgtcggaacgatgtaatgcaaaatgcccttgatgcaatctcacaatccctaggtgccgcaactcctgttgcgaccattcctcgcccatctcaagaaattgcgaaggttgatgagttcaaggaagcacctgagattgaagatgattatcaggaggctcgttctaatctgaaggaactaatcactcaggtaatggaatatgtacctgaggtagtagaactgacacgtcaatcacagtcagacaagatgatcaatgcgatggccaatctgctaaacacagcagccaatctcaacatcaacttgtctaagctgtctaaggacatcaagcaagctcctaagggtaagggagtcgttgccggctctccacaggaagaagttgctcaggtatctaacactacgaatattttcgttggttctacagaagagttcttggatatgatgatggagaaggataagcgtgccaaggaagctgcaaaggcagcccaagcagcttccgtcatcgaaggtgaatgcacgacagtagagacgtaacattccattggactcagaagagccttcggagcatatcctcacttcgttcggaattcggagactctgacgagtctcctcatagtggtcataatgtctttctgaaccttgaattttaatcacaattcggccaagctggctcaaatgatgattaagagtttaatcacaagactggtctgaccctatacaggacacggggaatcggtggcgccctattagtcaggattggtgcaattaagcaatcccgccagtccatatgccgcacagtctctgagcatatgaacacaccagttgcaaagtaagcagagctggtcaaactttaagccgtaaaggctctttgaattgtctctggtactacactcaacagactctatctcacgtcgcgactacgcttagccgacggctagttctgatctaattttgagaaacaattggtaaatattcttacagacatatggtaaatgatttcctgtggttggacaataagacttggaaacaatatgaaattcgataagacataccatggtgaaatcaatcccatggatcagtacaatggattgaacaaccttaagaaggcaggtgtcaagattcagatgactcctgaacaggctgaagagttctacaagtgctcacaggacttcgagtatttccttgagaactacgttgagattttgagccttgaccaaggcactgttccgttcgttccgttcggctatcagcgccgtgcaatgaagaagatcgtaggcaaccgattctcaatcctgcgatggccacgacagatgggtaagactacgacagtagcagccgtcctgttgtggtacgccatcttcaacaagaagtacaacatctacgtgctggcacagcagcgtggtcaggctatggaaatccttgatcgcatcaaggaaatgtacgagtgcctgccatggtggttccagcctggtattcacacatggaacaagggctcgatccagctgggcaacaagtccaagatcgtgacagcagctaccggtggttccggtgttcgtggtaagtcggtcaaccttctgtatcttgacgagttcgcatgggtcgataacgaccatgagttctacacagcaacctaccctgtcgtctcttcaggtgacacgtccaagatcatcatcacgtctacgcctaacggtatgaacctgttctacaaattgtggacagaggctctgcgcggtgacaacaactatgtctgggacgatgccttgtggcatgagcatcctaagcgagacaaggcttggtatgacgagcagatggctaacatgtctgagcgtcagttcaatcaggaattcatgtgcgagttccaaggttcgtctgatacgctgctctcgccggcaactcttcagagactggtcttccagaatccgattcgtcttcttggtgaccacaaggaattcaagatctatgaggatccgattcctggacacttctacgtcatcaccgttgacgtctcggaaggtgtaggtaaggactactcagttgtttcggtcattgacgtcaccgaggcgccttataagcaggttgcaatgatgcgatcaaacatcatgtctccattgctgctggctgaccttgttgataagacaggtaagaagtacaacgatggctatgtgatcgttgagtcgaacacctatggtaagcaggttgttgatgccctgtggatggactacgaatatgagaacatgcttctctcccgtggtggcaacaacgatgcaaagatttcgggcgcgcgcaatgagcgtatcgcaccaggcgtcaagactacaaagaagaccaagcagatcggctgctcaacactgaagggtttgattgagtcgagtcagctcatcatcaacgactacgacactatcgaggaactcaactcgttctctaagaagggaacaagctatgaggctgagaagggcaagtacgatgacattgtgatgagccttgttatcttcgcgtggttctctgcacagccttacttcgaggacacgtttgatcagaacacgagagatctagttcgtcaaaacatcctgcaggacgctgagtatcacactgccttcggattcatggacgacggcactgacgatggtttcgacttcggctttggcaagcagagtgaggaattgttggagactttccactaacctgagaacataaatatctcagacatattgcttacatgaagcacgatttttgatctcaggagaatatagatggcatcatctaatctaagccctggagttggtttcactgaaactgacctcaccaacattgttggttcttctggcacctcgggcggtgcatttgcgggtgactttgcgtggggaccagtcgagcagattgcgacagtgtcttcgccattggaactcgagaagacctatcacaagccagatgacaagaactacacttcttggttctctgcattcaacttcctcgcttatactggcgacctgaagattgttcgtgcggctgacgaagatgcaatcaactcttcggatgacggcaacggcttcctggtaaagaactcgaaccactttgaagttgtcaagactgctcctacaactgtgcagttcgctgcaaagtatccgggtgcactgggtgactcgatcgctgttcacatggctgacgcttcgacgttcgctggttggcagtatgcgtatctcttcgacactgctccgggctcctcgcagtgggctgaatcccttggtgcagcgaatgacgaacttcacatcgtgatcgttgacaagcagggtaagttctcgggcgtggttggttcggtgcttgagaccttctcttacctgtcgaaggcttcggattccaaggatgcgaacaacggtcctaacttctacatcaacgtcctgaaccgtacttctaagtatgtctgggcgctggctcttcctactggcgcagatctgtctgctccttcgaccggtaaggttgcttcggtaactgtcggtgcaggtggtactggctacactgcggcaccaaccgtaacattctctctgccaccagcaggcggcgttcgtgctaccggtactgcaactgtgacggctggcgctgtaactggcgtgaccatcaccaatgcaggttccggatacgtcacggctcctactatcacattcgcaggagcgggtacaggtgcaacggcaactgcggttgttggcactgtcactgacgctgcagaatggggtactccaggtgtggttgcaggtgaagcacagaccttcaagcgccttgtcgctgtaaaggctgctcctctgaccggtggtaaggattcgactgctatcactgcaggtgacctgactcgcgcttacgatctgttctcgaaccaggaagaagtcgacgtatcgttgatcttcactggcgatgcaggtggtgagactgagcacaacgttactgtccagagtgcaatcgacaacctcgctgaatcccgtcgcgactgcgttgttttctactcgccacagctctccgacgtcctgaacaagactcagtctgacgcagtgaacgcagttgtatcgactcgtaacctcgttggacgcgcaagctcctacgctgttatggactcgggttggaaactccaatacgacgtttacaacgacaagtaccgttggattccgctgaatgctgacctcgcaggtctctgcgcccaggttgacagcaccaatgatccttgggtcagcccaggtggttacactcgcggtcgccttaagaacgttgtctcgctagcgttcaacccgaacaagaccagccgtgatgcgatctacaaggtcggtatcaacccagttgtcacgttcaacaccgacggaactgtcctctacggagacaagaccctgcttggtaagaactcggcattcggacagatcggtacccgtcgcctgttcatctccctggagaaggacatctcgactgctgctaagtattacctgttcgaaaccaacaacgacttcacccgcaacaacttcgtgaacatggtttcgccgaagcttgagcaggttcgcggtcgtggtggtattgaggacttccgcgttgtgtgcgatacgtcgaacaacaccgccgaggtcatcatgaaccgtcagttcgttggttcgatcttcatcaagccagtctactcgatcaattgggtccaattgaatttcgttgcggttcgccaagacgtttcgttcgacgaagtggtcggtggtacattctaagaacaactactcgtagtattcttgagccccgggaaaccggggcttttcttttgcctaaatagaacgatgacaattggtaacctagcatgacatttgaagatttcctatacgaagcgtttggcgtgaacgaggttgttacctacggcacaaacccgacagctgacaatggcgccttctcaagacatgaaggttctattcacacctacatcctgttccgaggcaagaagtttatgatcttgttcctcacacaggacagctcaatcacattctcattggtcagcgagaagaaccttgattcgactttgattcctcaaaaggagtctaaggatggtctcgtgttctacaacaagatcttctcagctatgaacgtggtactcaatgccgcacacgctaagaagttccagtttgaaggtgagacagatgagctcaaagacctctatagcaagttcgtgtccaaccgatcattcctcagaatgctcaaggacaaaggctggcgatatgatggagagaagtacgaaggtttgtatcttttctcgaaggtgggctaagcctcctttctgtaaatatctacatctaccataggtgatgtgatatgactgcttttacatatttgattggatggcgtgagcttgatgtttggtactacggttacaagaaggcagacgtgtctgttctttggaagacctatttcacatcaagcaaatttgtcaaggaattccgtgaggaacatggcgaaccagatgtggttcgagttcataaggtgttccctacaaaggctgaggctcacgcgcatgaagagaaattcctagaacgtgtcaatgcggttaagagtccactatggcttaaccgacataacaaggacaaattccgaggtccagacaaattctctcccgaatcactggctaaaaaggcagccactgtcgctaagaaaatgggagatcctgaatacaggaagctcaaaagcgaagctgccaagaaggcatgggaaaccaaacgagctaatggctatgttggtcctaacaaagggcgagtgttttcccaggaagtgagagacaaaaagagcagagcgatgaaaggtcgcaaactcacagaagaacataagcgcaaagtgagtgaggcaatgaccggaatcaagcgtggtccgcgcaagactcctgtgtcagaagaacatcgtgctaagctcagtcaacgtgcgaaagaacaatgggctaagaagaaagcctcgcactaaataccgatgattctaaatgtatggttgagtccataggaatcattctcaactcaatctattaaggagccattcagatggcgcaagctgacgtatattctttcctcgcaaatttccgtggtggcggtgctcgccctaaccgttaccgcgtcaacatttccttcccgctgtctgtaggtcgcgctgttgaagcagcaactaagatcagcttcacctgccagtcggcttcgattcctgaatccacactgggtgccattgacgtgccttacatgggtcgtcaggtaaagatcccgggtgataaggtttggggtgattggactgttcagatcctcctcgacaacgacttcctcggacgtaccgttttcgagcagtggcaggatcagctgcttggtttccgaaccaacgttgctcagccacagatgctgaatccgatcttctcgtatgcacaggcagacatcatcactctggaccgtgcagaccaggaagtacagcgttaccgcgtttacggtatcttcccaacaatggttggcgaaatccagctcggctacgaccagaacgaccagatcgctctgcagccagtgacgttcgcaatcaacggctgggaatctacagctacccgtttctaagctatgaaacgaaggacagcccagtgaaatatctgggcttttctttggattaaatatcatgtgaaaccatgaaggaactatcatgcagatttttggttacgaattcgggaagaagaaagaacctacacaagagttgaccacgttcaatatcgaccgtgagactacctctgaggtcgtcgttcctgagacctattacaatgaccatgcgggcgtcatgtccgttccgtatgagttgctccagactccggcggatgaagccgaacttatccgttcttaccgagaccttgcatctaccgctgaggtcgatgaagccctgcaggaaatccgaaacgaagttttcatcttcgacgttcctggtaagaaggctgttgaactagattttgtcacagagtctaagctatcagctgcgatgcgcaagaagattgctgcagagtttgatgaagtttacaagctcactgactttgatatcaacggagcacagtggttcgacgattggtatgtagactccaagatctacctctacaagatggtagattacaccaagctcaaacagggtatccagaaggtccagttcattgacccactcaagattcgtcttgtccgtgtcatgcccaagcctaatcctgatggaaccttcgatgccgctaaggtcaagcagttctatctgtatagcaactttgatcctaagtctcatccgctcaatcaggttattcagctccagcagggtacatcaatccaaggcattcaaattcgtccagagagcatcacatatgtgaactctggtctgtttgatcgcaaccttggtcgctttgtcggttatctgaagaagtcgattgtaccattcaacatgctgaagatgatggaagatgcaatgatcatcttccgtgtcgttcgtgcacctgcacgtcgcgccttctatgttgacgtgtctggtctgcagaagaacaaggctgaggcttacatcaaagacctcatggccaagttcaagaacaagatggtctatgactcgaagacagggcagctgtctgatcgtcgtaacatcatgaccatgttggaagactattggctgcctcgtcgtgaaggcaagtccactgaggttacgaccattgaaggtcagaactctcaggacatcatggatgaaatcgaatacctacgcgacaagttctggcgttcgctaggcgtacctcgcagccgcttcggtgaccagcagactccaaacctgtttggtaagggtaacgagatcactcgtgacgaatatcgcttcacaaagttcctgcacactctgcgctcgcgattcattcctgttctggaagacatcctacgcactaacctgttgctcaagaagatcattactgaggcagactggaacgatatcaagcgcgatatcatctggaactacactgaggacaacaccttcgttgaatcgaaggaaacggaaatcctcaacaaccgtctcaatactttaaatacaatcgatcctcatgtaggcaagtatttctccaagctgtatgttcagaagaacgttcttcgcatgtccgagaaggagatcgcagaagaagataagcagcttgcaaaggaacacgcatcaggcatccacgatgacccagatgcagaagacggcgacaatggcgcgactttcagcggtaacgctccgcctcaaggtcaggatgacggagaggaacaagagtttgcagacatccagccgggcgacaacccatttccaacagattaaaggagccgattaatggcaattgatatcaacaaattgaacgcctacgacttcatcaaggaaatgaaaagccatatggctaacgtccttgaggagcgtctagagagtggtgaggtctgccctccgctgcctctggaagagcacgtagctaaggatacaaccgacaccgattggactgcaatgggtgaggctgaaaagaacctagtcatctcgctccgtgagaacggtcgccagcgtggttcagacgaaggtgcttatgcatctggtgtcctttggctgacattcaagaacaagaaggcttgcgaagactactgcacctacctcgaaactgccgatggcgttgacacctatgagattgaagctgtacgcgaagatctcgtgaacggttttgtcgaagatcaggaatatgacttcggtgacattatgttcgacaaggactttgagttcaacgtctatgtctacattgatgcagacctagttatgcttccggctgaagatctcgaagttggcgacgagtttgaatgggatgacgattcagacaacggtttcctgtccgaggttcgccgaaagatcaaggtaaacttccgcggtaagaagcgcatcaagatgcagtgcagccctggattcaagtgggatgcagcagctaagacctgtaagaagatctctggtgctcaggtagctgttatgcgaaaggcaatgcgccgcgcagtattgaccaagaagtcgatgggccagtcgttcaaggcacgagtcgttcgcaagacccgcaaggctaaccgcttccgtaaatcatttggactgggacgctgagatgacgtttgacgaatacctagcagagcaaaacttggctgcgatggctaatcatcacttcactaaggctaagcgccacaaagaaggcacgctgcattggcataagcacaatgcgcgtggccacgcactttgctcacaacatcacgataagaacggcgaccacaaaaaggctgccgagcatcacgccaagtgcgaagagcacattgccgctgccgaaaagatcgaagatcagaagcacggctattaagtagaagagagaacagggaatgcaagtactagtagaacgcattgacgatgttcgtaatgaaatcctcgttgaggaagttggtggcatcaagcacaagaagtacatcatcgaaggtatcagcatccaggctgaggtaaagaaccgtaatggtcgcgtttacccaaaggaactgatcaagcctgagatcgatcgcttcattcgtgaagacattgcacttggacgtgcggtgggtcacctcaatcaccctgcaaacgatccgcgtaacgactataaggaagtgtctcacaagtatgagtcgctgactgaggacggcaacaactggatcggtcgcgcagtcgtaaccacaggcacaccaaatggtcgtatcgttgctggtctgatggatgaaggcgtgaacatgggtacgtcaactcgtgctcttggtaagaccaagatgttcgagcagcgcggtcagaagacagctgtggtgcagagctttaggctcatctccccaggtgacattgtatctgatccgtcggcaccagatgcatacctcaccaacctgatggaaggtaaggagtgggtttgggaaaatggtctcctgatggaacgtgaagtggagattaagaaggagatcaatcatgcagctcgcacaggtacactgaacgaagcgaagatgattgaactgttcaagaagttggttgctctgagcaacggacgcgaagtctgagaatttctcagaactaaataccatagaacttaaaacatcattctgaaagatcttaggagtaagtaatgaatgaacaactaaaggaacttctggagaccctagagctttcagaagaaaccgcaactcagatccagaccatcctgacagaagcattcgcagctgcaaaggaagaaggtaaggctgagggcaagaaggaagctgatgaagctgctgacaaggacaaagaagcccttgaagaagcacatcaggaagaaattgcgttcctcaaggaacaggctaatgcctacggaacccacctgaaggaaaaggctaacgcttatggcgagtcgatccaggagtccgttgttgctaaggctaaggagtatgctgagttcgcagttgatgcattcatcactgagaacaaggaacgcttcgtagaaactgaagagttcgctcgcatgaaatctgcgttcgagttcatcaaggaagcatttgagaagaatgcgttccaagttaaggaagatgctgctgtaattgagctgacagagtccctacaggaatctactgctcagtatgagtcgctcttcgaagacctctctgctgctaaggaagagcttgcacagcttaaccgcactctgattctggagcgcgcaactgctgatctggctgagactcagaaggagaaggtaaatgaattgcttgaggctgtctcgttcgattctttggatgagtacaaggacggcgtagcaatgatcgttgagcaggctaaggctgtggctgccccagcacaggttgcacctctcgccgacaccccggaagtgctcaacgagcaagcgaccccggctaagaaggaagtcaaccaggatgtcaagcgcctgatgggcaagggccttctgtaagttgaattcccagaacataaatatctgagaattgtttaattcgtatttgagatttttaggagaacaaaagatgtctcaagaagaaaataaagtggataccctcctagagaagtgggaaccagttcttgaaagcgaaaaggcagatgcaattactgacccgtatcgcaagaaggtaactgctcagcttctggagaacacacaggaagcactgaacgaagcttcgaacctgaccgccggcgtgcagaactgggaccctgtcctgatctccatggtccgccgtatggctcctaagctgatcgcttatgacatcctcggtgtgcagccaatgaccgctccgtcgggtctgatctttgcactgaaggcacgtcgtgctgctaccccaccgaacactggtcctcaggctggtgcagaaatccttggtctgcaggaagctgatacttcgtactccggtaccggtactcacgctgcaatcactgatgcaaacttcctgactggtttcgcgaccggtactggtaaggtcacatcggctggtgaagtggatccatggaactcggtcggcgtcaccatcgacaaggtcaacatctcggcagttacccgtcagctgcgtgcagactactccattgagcttgctcaggacatgaagcgcgtacacggtctggatgcagatgctgagcttgttcagatcctcagcaacgaactgatctccgaaatcaaccgtcaggttgttcgtacggtctacaacgctgctaaggtcggtgcgcagtttgcttcgtccccaggtaccttcgacctgaatgctgacgctgacggacgttggtctgttgagcgcttcaagggtctgctgttcgcaatcgagcgcgacgctaacgcgatcgcaatcgagtcccgtcgtggtaagggtaacttcctgatcgtctcgtccgacgttgcttcggcactcgcgatggcaggcgttctggactacgctccagcccttcagggtcaggtttcgctcgaagtcgacgcaaccggtgcaacttatgccggtaccgcaggtcgcttcaaggtctacatcgatccgtacctcggtaccgatgcatacctggtcggcttcaagggttcgactcagtacgacgcaggtctgtactacgcgccatacattcctctggaactgcaccgcgctaccgacccaagcaacttccacgctgctctgggcttcaagacccgttatgcaatggcagagaacccattcgtgggcaactcgaccagcatcggttcgaacgccaactactactacagaaaggccctcgtcaagaacctcatgtaatagtgaggaacttgcaggtcactgtaaggttgcaacaagacccgcttcggcgggttttgttttggttggtgattctactatcgcaaggcataaatacggatatggcatatacatatctgatcggctggacacagcacaacaaatactattacggaatgcgcagtgcgaatacggtttcgcctgtcgatgatctctggcacatctacaagacttcatccgcctatgttgaccaatttttagcacagtttggtgaacctgacgtgattcgagttcacaaagaattcgagaccaaggatgaggcttatctatttgagacgaagttcctaaaaagaactaaggctcatatcaatgacaaatggctcaatcagaatatcatgggtcgcccacaaggtggaacacctgctcaacttgctgctgtcaagggaagaaagcagtctgacgaacataaggcgaagagaggcatctataatccaaagtcagaagagactaaggcaaagatgacagaggctcacaaaggttctaaaaattcgcagttcggaaagactggcgaggcaagttcacagtatggtcgcaaacgcacacctgagcaacttgagaagatcagggaaggcgttcgcgcagcttgggcaaggcgaaaagctaacgaacaatgatcgtacatctctatgatgcatctttcttgactgttaaaatgctcttgaaccagatgggtagcaaatagaaagaaagttagaaagaaaataaagaaaggagtatagatgccaccgaggtgtcgtgcccgaggctaaaagattcggcatgtagtacatagacacacgtggtaggtgtagcttttaagcaagaaagtgagatcccttgatactactaggtttcagtagatgaaggggtaattttgaaaagccgtagaacccttgatattactaggagttgcgtatgcagttttattcttcaatgaccttggcagactttgtagcagccaattggacactgatggaccctaatgtggttagcctcattgaacgagaagcagatcgtcttgctgagttggaagaagatgtgatctcgtggaaggcaatttcggaagacattgttgatgccaatgaagacaatcgtgattacattctcaatcgaattgaagacatcaagaaaggttcctacactctagatgagcttgaagagttcgttcgtcacatggatacctcagtatgatcagactcattggactaacaggtaaggcaggaacaggcaaggacacctttgcaggtttcatcaacaaggccatcaattttgaaccgtattcgtttgcaggtccactcaaggatgcttgctgcggattgttcggatggactcgtcatcagattgatcatgacagggaattcaaagaggcaattgatcctcgttggggtttcagtcctcgccgtgcaatgcagttgatgggaacagagtatggacgtcagatgcttcgcgatgatatctggattcacatggctaagatcaggcttgatgaaactcgtaaggcaggtctgctcgttgtggacgttcgttttgagaacgaagcatcatggatcagagacaatggtgggttgctcatccacattgaacgtccgggagcaaagtctgtggctgcacacgcttctgaggcaggtgttgcctttgaggaaggagacctggtcgtcaccaactccggatcattggatgctctccagattattgcacagaacatcgtggccaacctgagattgaccgattaaatactggcatgaccagtaaaacaatcaatcgaaatccagcgatcaacaccagctataagctcgagattccgggctttgattcgctgaactactttgtgcagtcaaccgaaatcccgtctctatcttcgggtggtgttgaaaccgcatatcaaaactggggtacgaacgtccccagtaacagaatcgagtttgatcctctgaacgtcaacttcttggtgtcagaggatctaatgaactaccaatcgctctatgagtggatgattcagatcaccatgactgagcctgtagttcctgagatgatgaagaacattgttctgcacatcaccaactcgtctcgtaatcacaagatgcagattcgattccataaggcatatccgaccatgttgggttctatcccatttgattcgggtgtcaatgatgtgaatcctctgctctgttccgcaacattccgttatcaatactttgagattattcgcgatgcgtctggacgaacttcaagctgagattgccgttgactctgcaatcaataataatgccctggatacggaatccctgaggattccgatgctgcactcgaagtactacaactacttccttacagagcttcgtattctgaaaggcatcgagattgaatataagcgtgtgaagaaagaacgccaccagtattggctgggacaggcgagtgatgaagtctacaaggctgagcctaaagacatcaaaatcctcaggcaagaccttgaactgtacctcgatgcagatgagaagttgactgagctgaaatcgaaatatgagatgcaaaagatgaagactgagatgctcgaagccttcatcaagacattgaacacaagaaacttcctaatcaagaactcaattgaattcctccggttcaagaacggcggatgacataggcacgaagaatgcaagcagatatcaaacttcactataagaacgaactacacgtcaccctggactgccctgttggcgtctcctacgaagtgtctgaggcgtttgcattcttcgtcaatggctacaagttcatgcctgcgttcaaggcaggtcgttgggatggtaaggttcgcctttacaacatcaaggaccgtaacttctacattggtctgctgccaaagctctttgaatgggctgaggaaaacggctacaccattgagtacgctaatccgaaggactttgagcgccagtacccaaccatcaatgaagagtcttggaacgagctgaagaagtgcggcaagtttgagcctaagtggtatcagaaggaagctgtcttcagggcaatcaatgagtctaagactctgatcctgtcgccaacaggctcgggtaagtcttacattcagtatctgatcacgcgttacctgcttgatcacactgatggtaaggtcttgatgacggttccatcgacgtcgcttgttgaacagatgttctctgacttcaaggactatgtagctgacgattgggacgttgaagagaacgttcaccgtatctactctggtaaggagaagtacacagaacaccgagtcgtcatctcgacctggcagtctgcgatcaagctacctaaggcatggttccagtctttctctgcctacatctgtgacgaggcgcatggcgcagacgcgaagagcatttcgcagatcattgaccagcttggtcatgctcagttccgccttggtctgacaggtacactcgatggaactaagatgcacgagcttgacatgcaggctcgattcggttccattgtgcgcgttgcctcgacaaaggacctgcaggatgaaggttctctggctccgttaaacattgagtgcttccagctgcgatacagcaaggatgatatcgctctcgtgaagaacatggactatgatggtgagatcaagttcttggtcagtcatccgaagcgcaattatctgctcgcaaagactgcattgacgcagaagggtaacaccttgatgctgttcaactatgttgcgaagcatggaaaggtgctctacgagttgatgaagccaatgtgcgagaagtacggaaagaatctgtacttcatctcaggctcaactgctgttgatgaccgcgaacagattcgtcagattctggagaaggaaaacaacgccatcctactcgcatcgtatggtacgcttgcggtaggtgtcaacgtcaagaacctgcacaatctgatcttctgtcacccgatcaaagccgtcatccgaacccttcagtcgattggacgaatccttcgaacggcagaagggaaacaagatgtaaaactcattgatatcgcggacgatttatcctatactacacgcagtggggtaaaaaagcagaacacaattctgcgccacttcctagaaaggctcaaaatctacgtaggcgagaaatggaagtacaaaatcatcccgatcaagatgggcgagtaagcgaaaactcagctgtagatttggtaaaggtcgaatcgggtaaggcatatccgattcggctaatgcacttcccaaacggtttgaatgtcattggttatgtgattgcagtcttcccagagactacgatggttctgcgaccctatacggtcacagttgattacaatgcacatacagataatgtcgaaggatatgagttcagtcctttcctggatcagatggcatatttcaatcctctggatttgacgccggttcccttcatgaacaatcagatgatcgctattgtgcgcccatcagaacatgtggtgagcaattacaccggcgtgatcaggttgagagaaaagattgcatctacccctgacgatgaacactttgagatcctagtatctcgagaggttcctgatagtaagacacttcactaatacggcattttcagcattgaccgaagacaagaagaaagcaaatcactatgtagacaagcaggcgctctacgctgacctgtgtgaatggaagattcggaaagacacggcaatcgctgaaggcaggaaggcaccacccctaccagattcggttggcgatgctatcatgaaggtagctgagggtcaggcatcacgtccaaacttccgtaactatacctatatcgaagagatgaagggcgaaggcatcatcgcagccgttcgcgctatgaactccttcgatccaaagcgcctcggtaagaacggtgaggttaacccgttcggattcatttccctgtgcgtatggcgagcattcctgggctacattgcctacgagaagaagctccaaaagactaagatggatatgatgactgatcctgtcaacgagttcttctcgacgatggatggcgatcacggtcactacatcgacaactacgacgtcgttgaattcatgagccactgaggtaatcatatgaagattgcaatgattaccgatcagcactttggtgttcgcaatggctccaagttcttcttggacaactacgagaagttctacaatgagatcttcttcccgactatcgacgaactaggcatcacgcacctttggatgcttggtgacttttgggaatacagaactcgtattgacgtggttactctgtggcgcgctcaagagatcttccttgaccgccttgaggaacgtggcattcaagtaaccatcatctatggtaaccacgacgtcgcctacaagaatcgaaacgacatcaactcgatcgacttcttggcgaagatgtacaagaacatccatgtggtcaagacgcatgagacgattgagtttgatgggactcctgtcaacttcctgagctgggtgaacaactccaacctggcagatagtctcgagttcatcaagaactgtccgcctaccatcctgtgcggtcactttgagatcaagtcgtttgaaatgatcaagggtcacgtatgtgaacacggcttcgacaagagcctgtttgatcgctttgatcaggtctattcaggacacttccacacggtctccaccgacggtcgaatcttctacatctcaaatccatctcagaccaattggtccgactacggtctagacaaaggtttccgaatctttgacacgaccactcgagagttggaatttgttccaaatccgtttgatgtctactccaagatcgcctataatgacgacattgatatcgtagagtttgactacgatggatatgccgataagatcgttcgtgtctatgtgcagtcttactcttcgacaaaccagcacaagctgagtctgttcctcgagaagttgaacaaggttgtctatagcgcagacctgatcgagatcgacgagactcaattcaatagcgagactggtgacctgcaattcgtagacaaccatgagctgattgagaaatacatcgaagaggttgtccagagcccaaccattgacaagaacgtcctcaaaggcatgttcaaggaaatgtaccgtgaggcactggatatggcagagacagaatgacaacttatgtagatgaaatgagaacagagcttcttggatatgcggctcttgatcctgaaatccttgcattcatgcgcaagcatttgcctaggatcatcgctgaagaacttgtaggtgtccaaccaatggatgaaggtggcaaggcctttgaggagctctatcagcatcttaaagcgactaacaaagcctttgtcttttcgagcaattttgaatgatctattttcgtaaactgagattcaagaacatcttgtccttcggcgacgttatgaccgaagtacagctggatcgctcaccatcaacaatggtcatcggaaagaatggtgtcggtaagagttcgctcttgctggacaccctcgcctttggtctgtttggtaagcctttccgcaagatcaagaaagagcatctgatcaacactaagaatggtagagatgctctggttgagattgagtttgacaaggatggcaagagctaccttgttcgccgaggcatcaagcctggcatttttgagatcttcgaggacggtaagctcctgaatcaggaagccaacaaccgcgactatcagaagatcttcgagcagcaaatcctctgtatgaactacgacgctgcctgtcagatcattctggtcggtaaggctcagcacacgatgttcatgcagctcaacactggcgaacgtcgcaagtttgttgaggttgtgctgaacctgatcgtgttctcaaacatggcacgtctgcacaatgcaaagacgaccgagcttcgtaaccgcatcggtgaactcaagactgcaatcactgtcgcagcagagaagatcaagatccgtaagaagtatattgatgacctcaagaacgctgataagcaaaatgcagcagcagaacttgaacgtatcaatgctcagattgacgagatcactgctcagttgaccgagctacatgcgcgtaagagcgagattgaaacggtcgaaggtattgacagggatgcctataagaaggcgatgaatcatctgtctgagcactccaagatgatcgtcaagctggacacttcgctgtctcagattgagaacagtctgcgccagttgaacaagtctcaggattgccctacctgtcatcgtcctctagaacatgaggatcatgctaagcaagtcgatcaccttacagacaagaaagccaagatcgatctggcaaagatggagctgtctgttcgcattcagcaatttgagtcggtcgtggctgaattcgaggttgcggttgctaagtacgacgcttacatcgacaaggttcgctcggttgacatgcagattgcatcggctgaatccaagcgagacttcctggtcgctgagacaaagaaggaacgtcacagtcaggcagacaagatcaaggaagcaaacggcgagttgaaaaagctcgaggacatgcacaccgctctggtagacaagctggaacagctttatactaagagtgattacatgagcctgattggaacgatgctgcaggacaagggcatcaagacaatgctgatcaagcgcttcattccgatcatcaaccacgaggtcaacactcacctgaatcacctcggtctgttcgtcaacttccatctggatgaaaactttgacgaaacgatcaaggcgcgcggctttgatacccttgggtacaattcgttctcagaaggtgagaagctgcgcatggatatggcgcttctgatggcatggcgtgatatcgcacgaatgcagggcaacgttgcaacaaacatccttatctttgacgagatctttgacagctcacttgaccaaggcggcgctgacgcattggcagacatgcttgcactggtgaaggacttgaacgtcttcatcgtcacgcacactccagagaagatcattgacaaagtccgttcaaccatgaagatcgagaaagtcgacgggtttagtagaatcgtatgagcacattctttcaacagttcttcgaggacacctgtaaaaacgtccttagcaatcatctcggcgagttgtcggatgaggtaacatatcaagagatccgtattgatctagccgaatatgctagactaacgggagtccaaattgttatgaaggtcgttggaccaaggcacctgaacttctctacatggagtcaggacgttcagtatttctatgactaccaatggtaaaagatcatgagtaagcgtttgacccagtacttctatctgtacgaactcggtgagaacaccatcaccgagcgcatcacattctttgagggcgaacgccccgaggctcttgccattcccggttggaagggttggttggacgagttggtccatgcaggtgaagctgcattttgatacatgcctgaggttacatgttgcctcagtcacctacctgttagtataagcacatattgttcacttaggagttgtaaattatgagtttgtcatctgaaactttgaatgttctgaagaactttgcctcgatcaaccagggtctcctgttcaagccaggcaatcgtcttcggactctgtccgttctgaagaacgtgttcgctgtcgctgaaatcaacgacgagattactcgcgagttcgctatctacgacctcaacgagttcctgggcacgatcagcctgttctccaagccgcacctgaccttcaatgaagatcacatcctgattcaggacggcaagaccaaggtcaagtacttctatagctcgccggcagttgttgtctcgccgccggacaaggatatcgtgctgaccgatccgctgctgaccttcgaactgaccgaaggcaacatcaaccagattcagaaggctgcggctactctgaaactgaaggaactgtcgatccgcgaaggcaagctgaccgcactcaactcgggcggcgttggcaatcagatcaccattgagctggataccgaaggcaagatgagcgacgagaagctcgtcaagatcgagaacctgaagctcatcgaaggttcgtacaatgtcaaggtcttcgagcaggcagttgagttcagccacatgaccaagccgggtctcgtctacctggtcaccgtcgaggccaagtaagatgacggccatcttcgggaacattctcgatcaggcgctggagctaaacctccagcgccaggccatcaatgctaactaccgacacaacttcgagcctcacatgtggatgcgcgagttctgtacggttcgcctgcagatcggtcgtggttgtggtcacacaatggcaatccgctctcgttctaagcgagatgatttggtgattgttccgtcgtcattccacatcatgacgatgtctgagaatcgagttgagaagcctactgtcatttcctcgacagatccgaacgccattgtccttcgcggaaagactttcaagcgaatctgggttgatgatgcttcgattcgttctgatggtgatattcggaatgtgtatgtgattgcattgatgcatcgtgccgaacaaattatccttgtaggctgatttaacaactgtgagatattgataatgagtgacgagaaagaaatgtacctgtggagtgagaactatcgtccgcacactgtgaatgactgtattcttcctccacgtttgaagacctacttccaggcaattgtggataagggacaactggctaacatgacgttggttggtggaccgggtacaggtaagaccaccgtcgcacgtgcgatgtgtgaagagctgaaaatcgatcatatcgtcatcaacgcgtctgagaacggcaacattgagacgattcgtactacggtacgacagtttgcatcgacggtcagcttcggtggtggcatcaaggccatcatcctggacgaggcggacggtctgaccaagaatgctcagcaagctctgcgcgcctcgattgaagagtttgcaggcaactgccgcttcatctttaccggcaacttcggaaaccagatcatcgaacctctgaccagtcgagcaccgatcgttgagatcgtcttctcgaaggaagagaagaaggctctgctgatggagttcttgaagaaggttgcaggtgtccttaagtcgaagggtatcgcattcactcctgaagaactgactcaggttatcgtcaagaacttccctgacttccgtaagacttggaacctgatccagcgttattcggctaacggttcactcgagattacgagtcagactggtatcaatgatggtgctctgaaagaactgattgattacctaaagggtaagaagtttggcgacatgcgcaagtgggtcgttgatcacctcgacaatgatgcagcatctctgcgtcgcagcctgtatgaaaagatggctgtctttgtcaagcctcagagcattcctcagctggttctgatcatcgcagagtacgactataaggaaggtcacgtcatggacaaggaaatcaacaccgttgcgatgttgactaccatgatggcggacgttgaattcgtataaatatctaggaggtaacaatggcatctatgagtccatttgatatcgcctcgcacatcaacgagaagaaaggtgtgctggatgttgaagaaattggctatagttcgtacgtagtcaacaaggtactgtcgaatacaattgatagtgtcttgttcgcgaatgagatgaatcgttactggggacttccaacccaggcgcaatttgacttctattaccatggtctgccgaagaagaagcgtttcggcaagtggcacaagaatcaggacgacaccgcgtcgctcgatctaattcaggaatactacggatatagtcggaaacgagccaaagatgtgctcggacttcttcgaccttatcttgatgacattcgcaaagaattagaaaaaggtggcaaaaatgtcgcaaaacagaaagcaggaacttcttgagtccttctttgaaattgaacctttgaacaaggatcagtttctaaaggtacgtgaaactttgacccgtattgggttgccgagcaagcgcaatggtgatcagactctttggcagacatgccacgtcttccataagcaaggtcgttactacatcgtccatttcaagcagctgttcctgctcgatggtcgaacagatgtaaccgactttaccgatgaagatgaagatcgtctggagttcatcgtaaacttgcttgagcagtggggtttggtcacatcactggttgaagtcgatgccagagttgaatcaaacgtaatgattatcccttatcgcgataagcataagtggagccttcgtgtgaaatactccttgggaaatactgataatggcgagagctaagaaagaagagcaggtcactgacctgggcgcgctggatatgtccagcgtagctgtcatcggacagattgcatcgttcgaagatgacaacgttggcttctatcagaagcgcaacaagaccattcctgattatgcgacagagttctcggcaggctttgacctgagcgttgacattgaagcaggtgacgtgatcaacaagtacgatcatcgtaatcagaagatcgaaatcactgctcgtggacaagacaacgctccggcgcgtctgtacctggagccaggtgatcgtgctctggttccgactggcttgcacgcggatatcccggaaggctactacatcgcgattcatgcgcgtagcggaacttcctggaagcagggtcttattctgacaaatggcgtcgcagtgattgacgcagactacgtgggcgagatcttcatctcggtcaccaacaacagtggcaccagggtagtcctagaagacggtgagcgcattgctcaggggctgctaatgcccgctgtcaaggcacccttcaagaggcttgacactaagccagcacaaaagactagccgcgcaggtggctttggatcaacagggagcaagtaatgagcgatatcaagttggtatggaccactcacggtcagatcctcggtgaagtcaccgccaagggcgatggttacgaagtagagaatccggtattcatttcgccgggtgggcagggtgtcagcatgctgcctgtgaacatgttctccgatgaaacgaagatcactctgacgaaagaggaccttcgcttcggtggtcacctgtttgagccgatcactgagctgcgcaacgcgtatactcagcagttcggatcagggattcagcttctgagctgagtcggctgaaacgccatatctcgccgagatcagcttgctaacacttgctgatccggcgatgacgcctagataggcaagccagataaactcaagtgatgctgccgctggcgcagtgatattgatgaataggaacgcgatggtcgccacaaaacaggcaacgacgttccagaattttgtagatgacacggtcagggtgcccggctcgtagaacatagagctgaggtcaagtttcctgattgccttgaacaagacataagcaatcattagcatgaagactagtgctgcacatgaggcagcaaacaggaagccgttggttccaatggctagccatgctagaaatgaggagagtaaagacataatggcgttctataccttttgcgattcgattggaagtaagatttaccacaggtatgtggacgatgccggaaaacgccatcaagaaattgttacaagttttcctatcgagctatttatcaaaggcaatggagaatacaagtcgctctatggtgaccgtctcagccgcatgacctttgatacgatttcggatgccaaagacttcatcaagaagtacgaaggtactgtgcctgtctttggacagacttcgatgcatcaccagttcatctctcatcgttaccctgagaagattgaattgcagtttgacaagtatcgcgttctcaacttcgatatcgaaacccgattcgacggtaaggacgatgaagatgaggtgttggttcgtaaggtgtttagtcttgaagaagagaccgtcaccgttggttacatgaagactctccaggacgtttgggaagtctatgatccgatcaacgagcgttggtatcctgcatctaaggcacctcagcgcaatccaggtggcttccctgacgcacagaatgcagcatacgagatcacgtcgatctcctgcaaggtgtttggtcgtcctcagaaggtgaccttcggtacgaaggaatatgaggtcaaggataagaatcagatctacaatctgtgtgcagacgagcgcgagcttctgcagcggttcattgactttgttcgtttggtcgacccagatgcaatcactggttggaacattgagtcgttcgacgttccctacatcgtgaatcgctgtcgtgctctgttgggtgagaagctgacaaacaagctgagtccgttccatgctcatactgatcgttgcattcaggactactggattgatgacgacaagactgagaagggatatcgcatcttcggcgtgaccactcttgattacatggacatgtataagggttacaaccctgtcaagagagacagttacgcactggacttcatctctgaggttgagctgaaagagaagaagctggattactctgagtacggcgacctgatggggctgtatcgtcagaactacgaaaagttcattgattacaacgaacgagacgtttacctcgttgagcgacttgatcagaagaagcagttcgttcgacttgtgatcaccaccgtcttgatgaccaagagtcgatatcaggaaaaggatggtaaggtaaagctgtgggacaatctgatctacaatctgctcaaggcagagaacatcgtcattccgccagcagttcagaagcacggtcgtagcatcattggcgcatatgtcaaggagcctgtgcctggcaagtaccgttgggtatcttcgctcgacttgacctcgctgtatccttcgatctgtatgatgttcaacatgagccctgaaactctggttcgtgaagagcaaggtcagcttgattgggttgagcgtctgttgaagggtgaagacctggctgcggattgccgagctcagggttgggcgatggcagcaaacggctcggcgtatcgacaggatgtgatgggcgtcatgccgaagggtatgaagttcgtattcgatactcgtaaggctgagaagaatcgaatgctcgaccttaagcgcgagaaggaagcatatcttgcggctggtggcacggaaggctcggaagagtatctgcgtctcgataacctgattgcagcggcagacgcaactcagggtgcgatgaaggttctggctaactcgggttacggtgcatcggcgaacaagggcttccgttacttcaacgtgagcatcgcggaaggaatcacattgaccggtcagctgggcatccagtacatcggcaacatgatgaacaagtacctcaacaagaagtttggtacggagaaggattatgtgatcacgtccgacaccgactcggcttacatccagttggagaacctgccttcggatccgaagaacattcagaagtcagttgacgagattgacgagttcctcgagaaggagttcacaccgttcatcaatgcagcatatcagaagctctctgatcgacttggcgcaaagaagaacctgcttgatatgaagcgagaagcaatcgcagacgttggcatcttccgaggcaagaagaactatgttctgcgcgtatgggacaacgaacacgttcgttaccatgagccagttctgaagatgaccggtatcgagactgctcgaagcgacaagccgatgatggttcgtaagaagctcgagagtgacctagagatcctcctgacaggaactcaggaacagttgcttacttccattgatagtttcaagaaggagttttataatgctcctattgagaacattgcttcgccgaagggtgtaaaggatctgacgaagtggattggtgacagcggtgaacttttgccgaaggctccatatcacgttcgtgcagcatacgctcacaacaccttgatcattgagaagggtctgcaaaagactgttgagagaatcaagaacggcaacaaggtgaggctgatggcgctcaaggcaattaacccttgccgatgcagcaacatcgcattcaatggcactctgcctgaaggtttcgatcttcacgagtacctcgacaaggacaagcaatggaatgctacgtacatcactcctttgaagtccttcactgaaatcctcggatggaagactgaaaaggtcagctctcttgaaagcctattcggctgaggggtttaagtatgagtgcagctagcgagatgttgaaactgttggccagtttgcagaacgaactggtcatggttgacattgacccggaaatggctgagtttgcggaacacgaaaagattctcgacgtgttccgacagactgtggcgtccattgaacacatctatcccatggtacaggcggtcgaagaagtcctcgactggtctatcactccagctctcttctatcacaaatggaagagagcagctgctcacatgggtgtcgatgacgacattggtgaagaagatatcggtccagacgttcgaggactactcggacgatttagcgacgataatgacgatgaagaagacgaaggagaagaaagttgagtttggttgataaattgatgaagcagtctacgattaaagagactgcatcgctggagaatagcaccttcttccagaaaaaagaactggtgcagacaaagattcccgtcctcaaccttcttcagtcgggtgagcttgatggtggtttcggtcctggtctgaccatctgggcaggtccatccaagcacttcaagaccagctttgtgctgacgaacatgaaggcgttccttgacaagtacaaggatggtgtggttctgttctacgattcggagttcggtactcctcagagttacttctcgtccttcggtattccgctggatcgcgttgttcatactccgattaccaacatcgaggtgctcaagttcgacctgatgcagcagttggatggtctgaaccgtggcgataaggtgttcatcgcgattgactcggttggtaacctggcttccaagaaggaagtagaagacgcccttgaaggcaagtcggttgcagatatgacacgcgcaaaggctttcaagtctctgttccgtatggtcactccggtgttgtccctcaagggtctctgtatgcacgtcgtggctcacacctacgatacgatggagatgtatgcgaagaaggtcgtgtccggtggtacaggtctgatctactcggcagacaacatctatatcgttggtcgtcagcagaacaaggatggtcaggaagtcgttggttacaacttcgttctgaacgttgagaagtctcgctatgtccgagagaagagcaagattccggtcgaggtaacgttcgagaacggtatttcgccttggtctggtctgctcgaccttgcacttgaaaccggtcacgttgtgaagccgtccaacggttggtatcagcaggctggcactgaaaagaagctccgccttgcagatacgaacaatgctgcattctgggttccgatccttaccaagacagactttggtgcaaagctcaaggaacacttccagcttgctcagactgaaatgatcaaggccggaacgatcgattacgaaactggcgaagtgattgaagaataatggttaagaaggttctaccaacaacgacgaactggctctatgctaaggagcctatgctcggagcgccaaccattgcgaacattacgcaatggttgcgtaagaacaagctgacggttgtccaaaaaggtcgtcgtttgacagtgaaccatcgagccaacgtagagcctgtccgcctcgctgacgaaattcagttgaggctggaaggctctcgtcgaatctcaaaccttgctgtgaacgtcaatggtattgctatcgtcgtatcggctagcctgaaaggtaacgctggtgaggacaatgaagaatacttgatgcaccgtgtcaatcgactcgtcggttggctcggtggacctgttgacgtgaccttcaagtcaaagaagaaaacttttgagatcaaaggcgttgtcgaagtctatctgtcaggacgtgatacgtctggacataagaaagccgacgtcgagttttggactaagagcgggaagatgattcctgtatcattgaagcaaggcaacgcttcattcttctcttcggctgactcggagctcaaggaaattgctgaggcttcggtgcgatacgcatttgagaacgccttgaccaattttgaaatggaccctgcaacaaagatcaggaagatcaaccctgaccttgtgattgaacctacagataaggaaaaggaatttgcccttttcggaaatgacatcttgaaaggtaaaggtgctatcattagacagtcattcaccatgaatgatttcttccaagatgtgcccaacaagctgttcattcacgtcgaagacatctggcaagaacttcgtgatgtgccagagattgaacagcctgtaattcagatcagaaacgacaaagatagaaaccgaagccacccactgctcaaaggtctacgtgcgctgacaatcaaacgtgctgtagttcctaagaatgctagatggatcgaccgtgagaaactaaaataatggaactctacgtaaaagaagcccgcgaagactaccttgaagtcatcgacttgaaacacccgcagtaccttttcatcttcgatggcattcatgttgggaccaacaatggcaagctagaggtccttgtaaataaagcgtcggtacagaaatccgacaaagcggaagagtctaaccccgatgcaattgtcgcggatgaagatgaattccttagtacacataccgaactaatcatcaacgaactgttccgtggtccagttgaaacggcacttggttgatattatcatataggaaatcgtaaaggaaagtaacatgcagaaagaaaaaaccaatccagaactcggtcagcgcgttcacaagcacctcgtcagcctcggcattgaaacgccaatcactgagctggtgaatgtcccgagcaaagagaagatcgcgaagatcgaagagttccagcgccagtcgttgctcactctgggtcttgatctgaccgacgactctctgatcgaaactccgaagcgcatcgcaaagatgtacgttgaggaactgttctacggtctggattacaacaacttcccgaagtgcacagaagttgataacaagattgaatacgatgagatggtgattgagcgttgctcggtcaagtctgtctgtgaacatcacctcgtctactttggtactgctcaccgtcccgatctgtcttgctgggtgtcttacatgccaggtgagaaggttctgggtctgtcgaagctgtctcgcatcgtagacttcttcagccgtcgtccacagattcaggaacgcctgactgtgcagattgctgagaccatcaagttcatcactggcacggaagacgttgctgttgtgatgaagggtcagcacttctgcgtactgactcgtggtgttgaggattccgatggcgtgaccatcacctctagcctgagtggttcgttccgtaccgatcctacgctgcgatcggaaatgatgtctttgatcaagggttgatatgagcgagcacctgaaagaacttgaaagagtagccattgaaaggctggttgagtacggtgatcctaagggtgtgtatgttgcgacgagcggcggaaaggattccgtcgtcgtccatcatctagctcgaaaggtgttcggtgatcaggttcatttgattcacacacctaaggtgaccggtttcaacaaggtacatcctgcgactgtagcattcctctatgagcagagtgcgaaatatggtctcaacatcgttccatttgaacgtatgcaggagtatctggataccaacaagctttggatccaaattgacggcactcgccgttccgagtttgatcggaccgatcgcagtgcagacgtcgtagtgaatggtaagttgatcagccgagcggacatgcctgttcatacggttggcggcttgtttggcaatgaatcaattttccctattgtggattggagtgatgatgatgtatgggcatatattggacagcaaggtattgaagtcaccgaggaatatcgtattctcgccacacgttgatgatgaagtgatcgggtgctttgaagcacttgatcgcggtctgatcacagacgttgtctacttctacgatatcaccgaagagagaaagatcgaagctctgaaaactgctgagatgtttggctttacgccgcattttgtaagctctgattggtttgggcttccgaaagagattgataacatcgcatctgatgatacgatcttctgtccgaccattcgagactcacattctcagcacgctgagattagcatcagagcccgaatcatgcgcagaaacactggctgcaagttggtgttctatacggtagacatggattcgttccaggtaccgcttcctccgaaggttcgagcaaagaagaagtctgtccttcaggaactgttcccttcgcagagtgttttgctgacgaatgagaaatatcatctgttcgaaggctatagtgagactgatcactatgaaggcatcgagttcaagattgacgataagcgaaaggtagtgatgaaaggctatcaggttccttcgggccttgaagcgccttgggatgattcaatttcagattctgaatacctcaacatcctgatcactcgatatttcaaccgtaattcggttagttacatcgcatttcacaatggcaataggtgggtagaatttaatggctaagattggtattgaagtagaaggcatgctgcgcggagagaacgttcgcacttatttctgttcggctcgcgagtacgttgagtcagatcttctcaatctcatctacaatctgtatgcgaatagtattgagatgatctacatttcggatcatcacaacgagcttgatctgcatcaccttgcagaagtgttcaatgatagtggcatcggtgtcaccgttgaactgaccgagttgaattcggttccgccagaaggtgttgagatcttctggaatgtttcgcaggcttcttatgctcagtctcgtactttgcatttcctgcgcccaaaggatcagatcaagatcgagaatgagaaacacgttcttgcattcgttgcaggcaatgcggtaatcacttatcctgaggactttaatggagacattgaagtatgagtgaagatttcatgagtggtatgatcgaccagattccggaacaggcaaagcgaaatctgttcatcattccgattgagcctctggaagagcggtacactggcgagtggtacaagttcctgccaccagcctttgccaagcacaatttcaaggtgacccagattgatggcgagactctgaccgactcggttgagactggtgcattcctggatatgaactcgacgatcttctacaaggcatctcagatgcagaagattgctcgcatgttccgtgagaagtctgtgcctcatggttcggtcttctttgtcagtgacttggaattctggggcattgaatcgctgcgcctgatggctcagatcaacaaggtcgagatcaagatctatggcttcctgcatgcggcttcgtacaccactgaagatgcattcgcagttgcggcaccctatcagaagtatactgagctgggctggctgaaagctgtggatggcgtctttgtcggttcgcactatcacaagaaggcggtgatggaacgtcgtgtgaacgcgttcgcgaacgaagctgaccgtcgtgagattgagaagaagatccacgtgagtggcaatccactcttcccgagcgcatatgacacgacttcggttggtccgaagaagaacaagatcgtgatcaccaaccgattcgattctgagaagcgcccggatcagagtttgctggttgcactccttgtcaaggaagcactgcctgatacagagattgttctgacgaccagtcgtccgactttccgatcgaatcagaaatggttggttgacctcgctcgcatgtacgagaaacaaggtctgatcaccatcaaggaaggactgaccaagaaagagtatcacgacgagctcaagactgcgaaggtcatgatctcaaactctatcgaggaaaacttcggttactgcattgtagaggctatcatgtatgacgtggcgcctgtactgactcgaggtctttcgcacgttgaaattgttcagggctttgaccagttcctgttcgacaccaacgacgaagcagtaagtaaggttatcacattcctgcaacgcgatcagcttctcaacgcgaagcacttcttggattcttactttatggctgctgacttcatgggtcagatcatggcccaaggatgatatgacagataactacaacggaaacgaactccactacatcgcaagcggaacgtctttcatgtacatcaactcactccgtcgagatggcggagtgaatgatgaaacgattgattgggtacgcaacatgttcgtaggagcagatcgtggacctaacaaattcggcatgctgttcaacgcgttcactgaatcgaccttcggtaaggtgttcaaggagaactatgctgacgtaatgtgcgacattcacgcagactcaggtggtctgcagatggtgtcgcttggcaaggttgctgacgatgcagctaagcgcaagatctacaagactcaggctgattacagcactgtggcaatgtcgttcgacgaaatccctgtctcgcagatctttgatccgtatgctggacgtggtgcaatgtcggcgacgcgtaagaaggtcttcgatcgctctcagctgaaagctaaggcaattgaatcaggaaagaatctacgtgaacagcttgaatactttgcggaagtcgggacgatcgctaagcctatgcttattgctcaaggcaattgtccagagacctattatgactgggttgagtacgtccaggatcagatccctcatgagctcatggacaatatcgcaggcgttgcagtcgcaacctcgacgcttggtcctggagatctagagaactacgaatcggcgtttgttgcttcgcagatgaatttccgttttgactgcaagcaaatccacttcctgggtgttggttcgtttgatcgtcttgctcctgttctggcactagctaagtcaggcgtctacaagaacaagatcatcagctacgacagcactactcacacaggtgggcttgctcgttcgcgattctacacacgacgtcctgacggcacctacgttggaactcgtctgttgcaatcggatggatatcgcccccgcgattatcagttcatgatggatcacattggcaagttcaacatcggcttcgatgatccggaatcgctctacaagtatttcatcacttgcccgagctattctgccgttgaggcgattggtgagtcgcacaatcgaccattcattccaaagacaaagattgctctgttccgatattcgtacgataacttcatcacacagattgaagagtacatggattcggacggatacatgaagggcattcgtaaggcgcaccagcatcctatcgcaggtcttgctgaatgtcgcactcgttccgacttcaatgtctggcactcgacgttcaagaacgttttgaagtcggacagagttcgatcgaagcagcagagcctcgaagagcttttcggttaaagacatagcatccgttgattcaccgtcacggatgctatatcatagttggaccatttaggagaaccattagatgaaaaagatttgggtaacattccggaaggcaggctttcaccgctacccagcagccggcacccaaggactcgaagacgtcgcgtaccttgcacaccctcaccgccacctgttccacttcaaggtagccattgaggtcttccatgacgatcgtgagatcgagttccaccagttcctcaacttcttggaagaggctgttgcactcaacggtcttgattacaagtcgtgtgagatgattgcagatgatatcgcaaagattgttgctttgaagtatcctgcactctaccgaacccttgaggtcgaagtttcggaagatggcgagtgcggtgttcatgcaatctatggcatcagcaatggcgaggtattcggctaatggcactgttcgaagtatcggaaatcttcagctcgttggaaggtgaggcacaattcaccttccatccgactacctacattcgttttgcacgatgcaacttctcttgtccgttgttcaacaaccctgagaagatgattgatgcaaagggctacgcgcctctcgattttgatccgaaggactatcaacgtctggaagatatcccgctgattcacaaaggctgcgatagtcagtatgcagtcaatccgatcttcgcgcacatgtggaagaagtacgacacggacgcattgattgatgctctgttcgaggttcttcctcagggtaagctcatctacagcactggtctacctcagatcatctctttgactggaggtgagcctactttgaagtggaagttcatccctgagattctgttccatcctcgaatgaaagatgcacgtcactatcttgttgagacgaactgctctgttccgttcaaggacgaattcatcagcaacatctacgagtggcttgcacaagactcgcgccgcatttggacatggagcaattctccaaagatctcgtccagtggtgaggatcgtaagcaagcgattcgccctgagattgctcttatgcagcacgttctcactcacaacttccccggtcgtgtcaatcagtatttcaagttcgtcgttgacggctctgaggctgattacgctgaggtgaaggaagtgatggagatctactacgctgctggtctgcctcgaactgttccgatctggatcatgcctcaggcttgcactgacgaacagcagaaggttacggcgcgcagcattgctaagcgatgcattgatgaaggttggttgtactcgcaccgtgtgcagaatgatctgtggggaaatggcgttggcacctaagatgctaacgtatcacgaatggatggttgcccacaaatactggggcaactatcacgccgagtacggcaaatactgtgctaagtggagaagagataatgaagatcagaatcgaatggacaagcgatagcagtgattgcgaaacctgtggttgtaactttgccgacggtgcgaacgtctacattgatgaagtccttgcactagagttcattcctattgctcactgctacgacggagacgatttcactcgtgattacgtgtatgcgcaaattcttaagcatcttgggcatgaggtcatcgagggatgaacgagattccgatctcagctgcacagcacgtagcgaagaagtatggtttcgaccagatcataattattggacgtaaggtcggctcccacgagcacgtcacgacttacggcgttgacaaagagaactgcgacgcagcagctcttgcaggtgatcatttgaaatacaacgtgatgggttggccaagaccatgaacgatgagaatcgttggactgtgtctggcaactggtatcattggaagtggcggcgcctagcgttcgccccgacctgttgggacaaaggcatcggagattccgatggcgagtggttctacattggtatgggcttctacttcctcatcgtcgacctaagacaaggaggattactatgaaactatttcgtaagagctatgatggcggcggtgattccggcgtcacaggctattggttgattgagtgcaagtctttgttctcaatcgtattgcttcactttgaaggcaagagtcgcgaggcattccattctcacgcatttaatgctctgacttggtggctcaagggagccgtaaccgaggagatgaaggatggtcgaatcagaacttggtggccttcttggaaaccaaagtggacgccgaagaactgcttccacaagattcatgctgatcctaaaggcgcctgggcactaagcattcgtggtccatgggatgcaacctggtttgaatctaagaacggtgaaacctatgaattaggtcatggtcgtgtcagaattaatggtctagttgagcaggattccgaatgagtgaagtaacaaatgagcgccttgttctctcggcgctggtaaagaatgaagagtacatgcgcaagattcttcccttcgtaaaggaagaatactttgaggacgagtcggagaagcgcgtcttcaagatgatcaatgcctatgcaggcaagtacaatgagatgcccgacaaatcgactctgatggtcgaggcaaagaacgatcgcagtcttgatgaaggtcgtagtgctcgagtaattgaaacagtcgcagacgttttcagcatcatccctagccagaacttcgattggttgaagcagattacggaaacctggtgtcaggaacgcgcagtttacaatgctctgcaggaaggcatcgcagtctatcagggcgagaacacaaagctctcgattgcagcgattccagacatccttgcaaaggcgatcagtgtcacgttcaacacacaggttggacaagactactttgatgacgctcagcttcgatgggacttctacaccaatcctgagtcgaaggttccgttccgaattgatacgttcaatgagatcacttcgggtggtctgactcgcaagactctgaacctgtttgttgcaggtaccaacgttggtaagtctctggcactggtcagcctggctgcggattacattcgcgatggcctgaacgtgctctatgtgtcttgcgaaatgcgagaggaagttgtgttccagcgagtggacgcgaacatcctcggcatggatatgaacaagatcactgacattggtcaggagaagttcctcaatcgcatcgagtctctgaaatcgaagtcgtacggcaagctgaaagtcaaggagttcccaccgacctcagcatcaacgttgaacattcgacagacgctcgacgaactgaagatgaagcaaaacttcattccagacgtcatcattgttgactacctgcagattctcgcatcgtatcgtcttgcttattcggttggctcctactacttcttcaagtcggttgcagaagagcttcgcgctctggctgttgagaccaacaccgttgtgtggtcggctgcgcagtttaaccgtggtcagatgaacgcgacggacgttgacatgagcggtatcgcagagtcggcaggtatcgctcatacggctgacggtatgtgggcaatgatcagaacggatgaactggatcaggtgaatcagcttttgatcaagcagctgaaatctcgatacgcgaacaagtcgatcaagaccacgttcacaatcggtgtcaagatcgagcatcagacactctatggactggacgatgacaggtcaggtgagttcactcaaatggactcgaagattgtcacagaccagaactcgctgaaggacaagttccaaagcgctaatggtggaagcaaattccaaggatttgaagtgtgaaagacgtgtggccagaactagtcaaggaatacgagcctctcattggggctctgtatcgctgtaatgaacacacctacaccttcttcggattggtgcacggtggtgacgactattactatggcatgtggcaacatggaacaggcaagtgtgagctcttgtcctgtgtcggtgcgcccgaatccttcggatacttccgaacacgaaacgcgacgagacacaaccgagtcggctacgctgaaatctgagccgaccgcagtcctatgtccgccagactggcccagcttttaaaagcgtatccagtaagttcctgattctgttgatattcttgacgggaagccctgctcagaaccaccaatagaatcagacacttacaagcctagtactgctaaggggtgtgccaggctcgagccagatgaccactcaaggtgacaccccggtttcccagggtgtcgagtggcctgcattgtcagatgtcagtccactatcagaagcccttgatcagggtcgtgtccgccatgtccttccagtcagcggcagaggtcttcatgaaaccggcgagctggttcaccgtacggatcgagaccgaccgcaggctcatcaagttgtcgttcatccacttgacgcactgatcaacctgcttctgatccagaccgaggtctgcacccagggtcgattccttgaggacctgctcgacacgaaccatgatggccttcgggttatggatgcacaggtccaggaagatcgaccgactcatgagagccagaatgtgcggagccagtcgaccttgcttggcgacgatgcgatccaggtcgaggttggtgatgaagacgatctgaccttcgtactggaatcggttcgggatatcgctgtctgcgaggtacttcgatgccttcgaccagctgatggtccgaaccgcactcgtatccagcgccgccttcagaatgttcagtgcttcttcgtcgtagaacacgcgatccacgtcgtcgagcagcagcacctggcccttacctcggttcttatagagcgtctcgtagagaccgacggcgctgatcgtgcccttggtcgagtcgtaggacttgatcttcttggtgcgctctgcttcttccaactggcgctccaaagtgaaggtcttaccgacacctgccgaacccgacacgatcaacgaacgaatgttgccgttgaccatgccctgcccgagcttctcgagcatgttgaatcgcttgcggatcatcgcagcatcaacgggcttctcaggaacctcgacggcgctgtcatcgtcatcgtcgtcatccgaagcagttgcctgagccaagccggctgctgtaattgcccaaagaccacgaccgatcttttccagctcgccctctttagcgcgcttcaaatactctcggttgaactgaccaagttgacccgtcgtaacggtgtcaccaaacttcattctcagttctttcttcatcgtagcggtggtgctcatgatccagttccttaaagtggttttgcctgacatctgacaaccacaattatacggatttcttccccaggaacaacctacgtaagtgtctgattctgttggaaaagccaaagctaccaaggattcttcggtacacaatcgaaggattctgtgccgttctggctcgatccactagaattggacgacataaaagtgaggcaattcgtcatgggtggcaatgcagttttcaatgatctttcggctcagccggtctctatcgtctgtcaagacagcagggatttctggagagcaaaaattgagcatctcatgctcacaatcaaccacgtcgcacgtcgaaccctctgggatatgagtgcaggcgccaagccttatcttgcaggctcaaccaagttcatcttcgatgacttcatccctacagctgagcttgtcaagtacaagaattccttcggtgacattgacattcaaattgatgttgagaagggagccgacttgatgtctgtcctcaatctgattagcgcaaacgaatgtgcaaatgagttccagattgtcgggtggcagcacacagtagacacaatcgtgaccatgtggtacgatgaagatgtgcagcagacgttccaagttgattttgagctcgtcgaattcgccaacaatcgcccgacgaactggtcgaggttcagtcgatcgagttcctgggaagacacctgcgccggaatcaagggtttcgctcacaagtatatcttccgggcgatcactgctatctggcttcgtgaagcgcaggtccagctcaagacaaagttcgtcacaaaaaatatcagccctatcgtgttcagtccgaagggtgctcgagtgaagtggcgagagattcgtccggacgtctggcaagagattcctatggacgaggaagctctaatcaagaacgtcgaagacctgttcaagctattctttaaggtcaagccagatgccgagtcaacctgtgagatgtattcttatcagggcgtcgtcaatctgatcctcacctggattgacaaggaagatcatcttaagatcgccgcaggtatgcgcaatcttctttggggtccgtatgctcagaagctgtaccgagacaatcctgcacgagacttctatgaaaagggtcaggcttatttgtatctgacagagactctgggaatcccggtcgagcccttcttcggatcggagaaatactatgagacgtattgatggcgttcttcaagacgattgatttcctcaaaagaaacaacgcggctattctaatcaacatcgtcttggcaaaggacgtcatgacgattggtaagaaggtcgacggtgaaagagttgtggttgaggctttgatgctcggagacaagccatccgagagtgaggaagagcttactcaatactgtctcactgtgaaaggttcacctccggcactctgggcactcgacaattggttccctgtgacacggttcttcaaagatcccaggttcgttccaaagtcaaccatcaagggaacacctgaggtacgcgataaggagttccagcagaggcaagagaagtcattagttgacgtcatcaacaagtggagtcaaccgatcaagctggaaaacttccacatcaaacgagccgaacaggctcctgagattggaccacacggaaaagagaacctagttgatgtcgtggtatgggacgaacacaatttttcgtataatgtgagttgtaagatgtctaaggcagctgaccttggctccggtggcattgctggattgcagaagtcggttcctgagttggtgaccaaactctactatcaagtcaagattgatctgtatgagttaggtttcgaggaagggaaggtgtacgatattcgtaacatcccgactgtgatgtacggtattccggacatctacgcgtacaagatgttcgccggatcagatgaggttggtggcaagattgatttcatctacgttggacccgatcaggttgactacaatggtgaggagttcaacggcaaattctggccagtggaagagtatgctaagaagaagccatactacctgcggctgagaaagagagacgttcatgcgaacatggttcgcatcaacttcactaagctcaactcacacggacttccttgcattttcacaacaggattgggcgactttgcagcagcccgtttcgtaattgatgatagagtgccacctaaggcaactgtgaggcaactatgctagtagcagagaagaagcggaagaacatgaagcacttccgagaaatgaatgatagagtgttctgtgaatggatccttggctatgaagtcgatcagcttgatctaagttggaagctcgacggattcttcctcaggttcggaaaggacaaagagaacaaaccttggttccagactgcacgctcgcctgtgctctatgatccgatggagatcatctggcactcgcttgagaaaggctatgatcacactggcatgagccgtgctgaggtctacttccatctcatcaagaccatctgggattcgaacatcatgaatcacttgccagaagactctgggttcgagtgtgaagtgttcgacaagtcgatgtctgtcttgaacaaggagaacaacaccagaacgttcgtgaacattccgtacgacgaagagttctttaagacagatctcacgttggctatctacaagctcattgaggcagcaacagctgagacatggattgatgggtactactgtgatctgaatctagacgacaacatccagacatttggcactcgtttcaagattgacttcaccgcgaaatactactttgagtgtggtgtcaaaggcatcacaggcaacggaaagcttcttcctattctggaatctcgccgccaggcagatagagaaaccaaacttggaatgaaggcagtgatcgcaacactcaaagatcaattctgttactatgtcttgaagcaggctcaagattatcacaagatgggaaagaatttcgaaggggttgtcatcaccgtaaataagacagagtataaaattgtcacagactacttccgagacttgatctacttcaagggagtgatgggtggctaattttgacttgttcttcggaaggttccagccggttcacagtggacatcttgctgttctcgagaggatgaacaaccctgttgtcgtcatcgtcaaaggaaaggtgtcatcgaaggacacggagaagaaccctttcgacttcgcctatcagaagatgcttctagagaaggtgaagcctgatgttagggtgttccagtcagagactggatatctcccggacattatcaagatgcttggtgattgtcctgatgctgtctactgcggttccgatcgcattggacagtacaaggcgcagatggaacgcgccaacaaagagcttgatgagccgtgtctcgtcaggttcattgaaacggagcgtgtgacatctgcttccgttgttcgtgaggccatccggtctggcgatagaaaagcctttaaggccaatgtccctagagcaatctgggatcagtactcaacaatgaaaaagaggttagaaaatggttgacttgacagtaactattccgtcgttcgaagacttcctggcagaagatgcaaaggcaatctcggatgcaaatcatcacaggaagaatggcgacggcgaaggctgcgacttgaagcctgttgtttcggacaagggctcgaccactccagaagtgattgagaagtcggacaatgctgcacctggcgacgacaatggcgaaactctgcctaagccaccggtgagctaagatgagcgaaggcgccaacgtaactgcaggtgtggcgaatccagacaacgtcatgccacccgagaagccacagaagcggaagggagaaggagagttcgcaaaggaaatcaatgcggctgtctcacaggctggtaagaagctggtagagtctctgttggaagcgaaggcgcctaagcaatttggcttgggcgacaaagtaaaactcaacggcaagcctggacgaatcacttcggttgtcagcacgacagctgaagatggcaatccagggactcactggaaggtatctatcaagtacgaagatggcaaggaaaagacttacatgtctaaccgcgccaagatcgttgtggtagagaagcaccctcagtacaacaagcaagcagaatggcatcaaaaggatgctatggcagctaagcgtggtgcagactacactcgtcaccactctgagatggccaagtaccatgataccatggtcaagcatcacgactacgaaggcaacactgaagaagcagacaagcaccgcgaagcagctgtgacgcatcgtgctgaatctgagaagcgtgctaaggaagccgcagcaggcggaggctttgtaaccaagcgtgagatgcagtccaagcaacagcaagcctatcgcaaccatgtagctgacgaacgcgaaaagaagcggcagtgggaagaagctcgtaagacagctgcggctaatcgcaagtcctacaagcactactactctgttcctttcgctgacaaggatgaagctaagtcgaagggattcaagtgggatccaaacgagaagaagtggtacgttacttctcaattcccgaagccaggcacaatgaagtggaaggcttcgcactccgtcgatgaaaagacaggaaagaaagtagatgactgatttcgatacatggttgtacgaagatctgaaagttcccaacgccaaggatggcaaagggaaaatgcgtcatggtatgccccagcttacgcaatttgatgcgttcatggcagacctaaaagacaacgacattgagacagaggtcaagtcgttgagtccatggaagttgaagcctacacagagcaacttcaatgaggagaaggttgactacctgatctccagtgctaaatgggaagcgaagcctataattacaagtgccgacaactatgtcgtagatgggcatcatcgctggttggcggcagcaaagttcgggaagaagattcaatcaagagtcattggcatggagtgcgatgacctgttgaagttcctcaagggcaaatcctatgttgaaacaaagacaattaacgagtgatatgaatggcgcttcgaacccctgcaccaattagattttctctggagattccagagctaaacaagacgatctcctatcgtgcccttaaggtcggtgagcagaagtctctgttgactgttcttgagctgaaggatgcttcggcgatcatcaacacgattgtagacatcattgatggcattacgtttggcgagcttgatcttgctaagacgcctatgcatctcattgatttcatcttcctgcacgcatacatcaagtcgtcaggtgctcgctcaaaggctgagtacacctgtggtggcgagatcgaagtagaagaggaagtcgagatcgaggaaggcaagaaggaaattgtcaccaagactgttccttgtggatccaggcacgaactgctcctcaatctcgagaatgccacgattaaatatccagaaggatataaggcttctaagctggtacagatcgatgactcgatgtctatcaaactgaagatgcctgacttcgccagcttcaagaagctcgacctagacgcagacgtcattggtatctcagaccagtacatcttctctggcattgagtacattcttgatggcgagaacatgtctgtcccgggtgcggatttcgacttcgatgaaatgacgacttggctcaacgaactgccttccacggcgcttgatcagatcacggaattcttcgaaggcgttcctgtcctgtcccttaatgtggacgtgacttgccctaagtgcggcaggaaggatggtttcgagcttcaagggctcgacgattttttcctgtaatctatccagctaacaagctagtagacatgctagaactgaggcacctactagtaacagaacacggatatcgtctagatgaactggatgatatgcctttgttcgagattgaaatgacctctttgattgcagttgaaacccagaaaagaaagatgaatcaattaggttaaggtaaaatgcttccagcacttctaagaacagttggttcttcattgttgagatcagaggcggttagtgcaggtgctaaccgccttgtcgtcgcttcgagactcaacaaggtcgcaggtaacaagctagtccaaggacttgcgaaacactctggagcttccaaagttccggcgctggacaagattggtagttatcttagcaaggttccttcaggaaaagagaaggaaaagaaagaacgtggtacatccacttcttcatcttctaagaaccgtgataaggcccgtgatgatgctgccaagaatcaagagcgtcaagacaaggctgagaaggaatccctaggtgtacaggaagagaatgcaagccttctaaaggtcattgcaaaggacactgtacgcgtccgtgatgcggtcgaggccctggctaagaacggtgtcggtggaggcgcgggcggtgatggaatgatggacaagctgctcaagaccatcacttctctaccagcactgctcccttctcttctcactggtcctgcgggcaaacttggcggctttgtaaccaagtttgcatctaagattcctggcgttggaagactcatggggtcaatcggaggcatgggtaaggcaggcgaagctgcaacgactgtagctcgtgcgggtgtagctgcggaagcaactgcggcaagagcaggagccgctgctgttggacgtcatgctctccgtgatcccaagacaggtcgattcattgcacgtagcgcagtacaagccgctgaggttgctccaaagggcattctggctaaggctggtgcagctgctgcgggtgttggtggtgcaaagattgcaggtaaggcaacaggcgcgattggtaagggcatcgcaaagacggcaggtaagtctctgctcaagaagattcctatcattggtgcaatcgcaggtcttggtctggcagcaaaccgagcatacgcgggtgactggacaggtgcaggactcgaagcagcttctggtcttgcaggaactattcctggtattggtacagctgcaagtcttgggcttgacgcggctatccttgcgcgagaccttaagaatgacggaagttcgacacctgctgtaaccgcagcagccaagccagttactgcatccaagcctccggtgcacacggctgcaattgcagctgctccagtggtagcgcaacgcaaaaccgcggcagcgactgactccatgcaggtcactatggcgaagatgcttgatgtgatgactgaccgctccaagggcatctacatcgttcctgctgaggttggagcatccactcttcagactcgctcgccttataaccctcagggtgttccaacaggaaacaaatacgagccaatcgtcagtgcaagtccatatgattcagcaccaagcagcatcggtcccgctacggcaggtcgtacaatgggtgagggaacatccgtaacctccggtcagacaatgcgaggcggtcgtgttgagattggtccaacaggaaactttgaacgagatcttctgaatcagattgcagcaggtgaggcaggtaaggaaggctacgactcggtatggagtggttctcgtgtcaagccaaccaagcctgtgtctcagatgacattcggcgaagtgatgcagtggcagcgtgatacgctcaacgaacaaaagagccgaggcatcccagcaaatcgtcgtagttctgcagtaggacgttaccagttcatcagtggtacactcaaggcacagatggctgcggcaggatttaaggaagatgatctgttcaatactgagaatcaggataagctcgctcttactctgatgaaccagggtggcaaccttgacaagttcaagtcgggtagaatctcagcggagaagttccaagattacattgcatcacagtgggcatcacaaaagactgcaagcggagcaggcatgtataatgctgcaggcttcaaccatgcaggtcacagctcacttggattcttgaaggcagctcaagcgtcaggttctctgacggcatcctcaggttccccaactgcaatggtaagagatgctgcacagcagaagcaagccgcacgtatggcgccaatcgttgtcagcgctcctacacaggtcgttcaaaacgggcaaaaggaagccgctgctccaagaacaacggcttcggcaacacctgtcattgtgcgtaatccggactcgccggttcgctcctacgtactatcgcaaatcaggacttcttgagcttcttcttgagctcttgaatctcatcgtagtacttctgagactgggacgtcaattcggcgttccagactttgcattggttgagtcggtcaagatagagttgagactctcctgcgaaactccaaagaaattggctagtttgtggagaaagtagttctcctgtgttggtgttggatccgttactgccgccggtgcttccttgaccaccggtggatccggaattaccacttgctgatgggtcgcgcaggcggataccagcaagcttagacacagcagcatcgagagaagcagtgcgcgccacataggctttgtcgagttcattctttttgtccttgagactggtttcaaatgtcaatttgagattagcagatgcgccttcagccgtagccaccttggtcgccatttcggcaacctcggctttgtgcgtagcttgaatggcatcaatttgtagacccttgacataccagattgagcctgcgccaccacctacacccagtacgagtgcgatgccgatgccccaaaggaatgtctgggtattcaatgcgagtttgcttagcattataggtgccccagattgtaacgattagtgacgtcctttaggatatcgacaacaattcgatttggccagacgtcggcgccaatcgaccaatcatattgatgcaagaacatgagaatagcttttgcgacactgaattgaacatcattcaggagcactcgacagatagctgttaccttctttggtccaaagacatttaaagtgacaaccatattattgatcagcaacttctcattgatttgaccggtctttagaaaccggtcaatcatcttccttgtagtcatgaagacagcaaagtctttgtcaaaagtcttggcatggaagacgcctttaccataaccaccaagggcgatctctttcgccaagtctttcacatcactcatctggggaccttactcggcagccttcttgttgttcttcttgctggtctttgatgttgtcttagcagccttaggcttggtctcttcgacttccttggcaacttcctcgaccgacttggtctcttccttgattgcctgaccctgctcttcgctgataatagcaatggcttcaacttcaccagcatcatctagctttgcgatagcaccaatcggagcatcttcaaggacagcttcgattacatcaacagcttcttccttggcaaaatcgccagtctctacagaaaatgcatctgccttgatagcagcaatctcatcttcgcttagttcacggctccctgccggcgcgatcatatcctgcaaatcttcaagagaatgcgtgcgctttgaccaaaccactgcgtcgggcaatccacgaatcgacacgacgagctcgccggtgcttgggttgacccatccgaggtgagtagcaactgcacccttcacgacttctttagttctatctaccatcttgtttcacctttaattggacgaatgcacgacatcgcattaaaatagatcacatgaactatctagatttgaaatacacgaggctcgtgtcaagttatttacctgggtggaaggaggtaagtgcaaccttgtctcgttttcgttgcccgttctgcggcgactcgcagaagtcggaatcgaagactcgtggatacttctatcagattgaaggcaatgcgaatttcaagtgtcacaactgtggcgcttcgatgggattgtattctttcctgaaagaggtagcaccggtactggcgaaagagtacacctttgagaaattcaagggagtcaaggcgttcgagactgatccttttgagaagttcatctcgaagccaaagtttgcagacaagactctcttggatgattgtcaggctatctcaactctggaggatgaccataaagcaaaagactacatcaagggtagattgattccggaaaagttcttcggtgatctctactactgcaaagatattcgtttgattgcggacaggcttgatgactatcgagaccgagaactgcctcgtagtgattgcatcatcattccgttctacaatgaagcgaaggaactggtctacatgcaggctcgtttctttggtgacgtttcgatcaggtacattacactccagattgatccgaacgcaaagaagctgtggggccttgacagggtagattggagcaagaaggtctacgtctgtgaaggaccgttcgacgcgatgtttgttaagaactgtatcgcagtcgcaggcgcaagtatcatgtctgaaattaaatacctgcgagaacatgctaaaaaagaccttgtcttgatcttcgacaaagactatcagacaaatccagaggtgtatgggcaattcctcaaagcggtcaatcaaggcatcaaggtcatcatgttcgatccgcagttcgctgctaaagacatcaacgcccaggtacaacatggaacaagtattccagacctacagaaatatcttgagaaacggactttctctgggctcggtgccaagctcgagcttacgaaagttagacgtccactcaagagaaaataatggcacgtaaacctcacaagtcgccaaagacatcgcagcatgatccactcttcgacaacttcaacctcgaagcaaagggatcaggtactcaagccgaagcacgccttgactgggaggcaggaaagaatcttgtcctgaccggttatgcaggcacaggtaagacgtatcttgcgctcgccctagcactccaggccatgatggcaggagaggtccgacacattcacatcgtccgctccgcagtttcttcgcgagacattggtcaccttcctggtaccgaagcacagaaactcgaagtctacgaaagagctatcaagtcaaacttcaacaagatcttgaagcgtgctgatgcctacgaatgtctcaagctgaagggcgccgttagttttggatctacttcctttgaaaggggtgtgacatatgacaaaacctgtatcattgtagatgagtttcagaacgcctcattcgcagaacttgatacggtagtaacgcgtctaggtaatgactccagaatcatcttctgtggtgacactcgacagacagatttgtctcctggtaagagtggattccataggtttgttcgaatcgcagatgcttgcggaaagttcttcattcgccatgagtttggcatcgaagacatcgtaagaagcggtttggtcaaggcatggatcatcgcagccgaagatgatgcaatcaagaacaacccaacctgagaaatgaaatgattatcactgatgatgtaatgacctcgctgtccgataccgatctgtctgaaggcactacgagcgcagcgaacctgtatgctcaggcgctgtatcgtgatctggttcgtcaggcactcgctcgtaagagtaagcacaatactgctcgcgccctccgtggtcgtgctcgtattgccaagcgcaaggctaagcggaagtcgtaacatatgagcagcaagaaccgtcgtgacgaaaccaacgtcgaccacttcgcttctagtaaagaccgccgtgccgagaggaggtcgaaagatctcctccggcgggcgcatgatgtggatgaagactgggacgagtatgaactagactctcgcgagattcaccgcaaacgaaatcaacgaatggattaatcatgatcgttattgatatgtcgaacctcgtgttctcacaggttctcgacttccatcttaagaccaaagaacaggttgacatgcccgtcgtgcgcaatctgtgtatcgacaagatgaagtcgcacaaagcaaaactcggtaaggagttcggaccggagattgttctggcatttgactctaagcattattggcgtaaagacatcttcccttactacaagggtaagcgaaagaagggtcgtgacgaatccacatttgattggaaatcgttcttcccaatgtatgatcagttcaagcaagagcttcgtgattacttccctgtgaagtgtctggaagttgaaggcgctgaggctgacgacttgatgggtgtcctcggtcctcgttacgctccgcacactccggtctgcctggtaacgtctgacggcgatatgatccagttgcagcatcagaactcgaacatcaagcagtggtcgccttggcacaagaagttcctcactccgaagaatgctgagtatgatctgtttgagcatatctgtcagggcgacgcaggtgacggtgtaccgaacattcttagcgatgacgacaccttcatggctgatccgaagaagcgccagaagcctcttcgcaaagaccgactcgcagagtggaagaagcacggcatcaccaatccagaatacttctgtccagattcggcagcgcttgatcgcttccaccgaaataggaagttgatcgaccttcggtgtattcctgctgacttaaccactaaaattgttgaatcctatgaggcggctgtgcctgcaacaggcaagatgttcggttacctcactacgatgaaactcacaaagatccttaaggaaggcggcttctaagatgccaatgtacgacttcaaatgtaagacgtgtgatcatgttcaaactgagatcatgtctattgcccggatggaatcaggcgaagaagccgtatgcaaagagtgcggcgaggtgtctgcaaagaccttcaccgcaaccaattgggaagctgcatcggctgagtcacttggtcggaagaaggctcctgaggacttccgaaacttcttgacacagattaagaaggcacatccaggtagtactatcaaagatcattaatcatggctaagtctgtggcaagtttgatgggtggcggtccttcaccccaagtaagacaacaccttgaaaagttcatggccaagaatcagtccgagactgataggtttattcatacatacacgtcactcctagatggtatgtatgatatcaaggagacgatcaagtctacgtcttacagtgaacctgaggaagtgaagttcatcacaggtaaagtcaagcaactccctgaccccgatgtgaactggggcttctcaactattggtgattcactttatgactgatctcattcaactgcgaaagctcgtcgcagaatacaaggctgatcacaagccgctcgaacgataccctggtgtaactcgtgtcctcagtggcaccaaagacatgacagggcttgatgcatggcgtgatcgaattggtcatgaagaggctgatcgaatcgttgccgagtccaagatgattggttcctcactcgataagatcttcaacgattcgcttgagtcggtcatcaatcaggtaccatttgaagaatccctttatgagaacgaggcaggctataaactgtttggacagttgaagccctacttgaagagaaccgagccggtagctgtccagcttaaggtctggtctgatcacatgaagatgatgggttacctggattgcctgggtctttatgatggtgtccttactctgattgattgtaagaactccaagaaggaaaagcgagaggaatacctcgaggactactacctccagtgtactgcctattcgatgatgctgtatgatatgcttggcctaaagatcaagcagatggcacttttcattgctcgacgcgactcgccattcccgcagatcgtcatcagagacatcaagccgtttgtaccgatggtgttgggtcgagtaagaaattactatgggaaccttgcacaatgaaaatcaaaggcactaagatcgaaacagtcgatgttgatatcgatcctttggaagtgatcaggacttgctacaaaaggtggaagagtactactcctggcgagttcatcaggaatggtaattggtatgtcgaggtgcacacctcacattcgtatgatgaattggttggtccagtgtctgatcaagacatggaaatctacaaggcattccagatcgtctcagaattaatctcaggaatgaaatgaattacagtgaaaagatcctcgaggaactgacgctaagagcaaggcgggacaacatcggcttgttcgaggcagcatcagactactgcgaggaacatgatttggaacaagccgagttcgttgaaacactcgaccctatcatcatccaacgtctcaaagaagacgcagcccgtgaacgtaaagtcagaagatgcgtgcagaaaccgtccaaaactcttttctgagtgcaccactcagaacattccaagattatgtcgggctcaagctacacttcaacggtgacctagtatggaagcgccacatggtgctttcacttcgtgaggagcagctgctcaaacgaaaggacgcatactatttcatccagttggctgagcagcatgatcgcgaaaagatcatccaaatgatgatctcgatgttcaagcgaaagcgtgactcttggattggtgagattctcgaggaagagaacgtcgagtatcacaagaagcggatggctgtaatcaactcgttgaagtacgttattcgtaccgacattgaacgcatcgtgttgttcatggaggacaataagatagatgttcgtaaactccttttgtcggacggtcaaagtccgtatattgtatcacaccagtcggacattattggtggtgtgaccgacgagacactcgccctgttagagagggcgttcaagttttgctcacaggacacgttggaccctctttgggaagagcgcaagttcatgctgggtaaatacagtagctggattgaggtggacggagacttcctgaaacaacaactcaaccggctagtagaggcgaagtaagtccataagagacagtaagacctcaattcaaatagagaaaacggagactaaagatgtcatttgcagcacttaagaagcagcgtggtaatttcgccgacctcagcaagaagcttgctgatgaaaagaagggcggtggtggtaacggtccagatgagcgctattggaagctcacgaccgacgaagctggtaatggttacgccgtgatccgattcctcactgcaccagtgaacgaggaatacccattcgtcaagatgtactctcacgcgttcaagaacgatcgtaccggtaagtggtacatcgagaactgccgctcgaccatcaatgaagccgacccggttatggaagtcaattccgaactgtggaactcgggcattgaggcgaacaaggatctcgctcgtaagcagaagcgcaatctgaagtacatctcgaacattctggtcatcaaggactcgaagaacccgcagaacgaaggcaaggtcttcctgttcgcatacggttcgaagatcttcgagatgatcgaagctgctctgcagccgaagttcgaggacgagaagccgttcaatccgttcgacttctgggatggtgctgacttcaacctgaaggcatacaacggttccaacaagcagcgttcgtacgataagtcgggcttctcggcaccggcacctctgttcggaggcgacgacgcagcactggaaaccctgtggaacaagcagtacagcctgcaggcagaagttgctcctgagaagttcaagtcgtacgatcagctcaagacccgtctacaggcggttctgggcaacgctccaggtggacgtcctgcatcgcaggcaacgagccaggcacaggctgtggaacgtgaattcgcagaaccggcacgtccggcaactcgtcaggagccagcagcatcggcaagtgacaacgaggacctgtcgcagtatgcagcgctcctggaaggcttcgacagttaaggtcgaaaccatagtttgattaaataaaggaacggcgcaggtcgttcctttatttttagctgacaagaatatgatcctacaagagaacagcttttattcagaccaatctggtctcgctacgttgctcacaaacaagcaactcgtagccgatattttctatatcaacttcctcgggtttgctggactccttaagatcaaggacgctcctgcgctgatgacctatgtcaagggtttgggtaagctccagctttccaacatgacagacaccaatgctgattggagcctggctatcaagctggcacatgatgcaggtatcatcaacatggtcgctgccaacatggcaacgaagttccttgcactggtcaagagcggaaagattcgctcagctgaccttaaggacgatccaatccgagatatcatcaaggcttgccgtgtaatcagcaacaagccttcaccccgtatctatcaggctgttcaagactttgttgatgcaaaggaccagctagagacgacaaccgtcaagctctggaagctgtctgcacgtccagagctaatgaccgcggctaaggaattccgtgaacagatcaccctgggtggctattcgtccgcattcctgaaacaccagtgggcaaatggaactgcaacgacgcctgctccagctgtagctgttcagcagccaccagcaaagggccagcgtggttcgttgccacctcagggtgctgcacatggttccgactcggattacatggctgctcttctccatgtgttcaagctcaaaggtggtattcacagctacctggaacgtttcggcttcaagggtcactttgacgttgatcgtttcaagaaggctgtcgcatctcctgagttcgttctatctcatggctatcacgtgccttgggagcagcatccgtttgtccagtggattcgtaagaaggatccttcggcttcggcagctgtgctcaagatcctcaatgacaaggatcgtcagacaggtgcaatcgctgtagcaactcaggtatcgaatactgcacctcaggcacctaagccagctgctgtaatccagactgtcgttgcaaatcgccaagagccgattgtgactaatgagtctatctctgagatgtacctcaacggttttgatcctaagcttcatgcgttgatgatgaagtatcattggcctaagggcgaagaagcgaacatcatcaagtcgaatcttcctaaggttctgagcgccctcaagacattcgaggttgatgagcttaagaagcctcatggtcgaattgaacagagcgaatatacgcagagcacctttgcgcgtatgcttcttggtaacggcgtgatgccatcccagatcaacggacctatctacaacactctgttgaagtcgggcgagagaaaggacgctgatgctgtattcaatcttctgatcgattacaacaacgcatccactttgaggcagaacgcgtttggtggcgacttcggtaatgacccagttacgactgcggtgtcccgcctgtttgatggagatggtgttgatttcattcttgatcacctgacacagatcaacagcgcaggattccagccaatcgtctatgatgcaggtaagcatctttggatcggaaacgatgccgaaacagagatgatccgtaacctgatccaatgcttgatgttgcctacgtcaaccctggacggaattgttcgcaacatcgaggcaacgtttgctcgtcttgatatcagaactggtcgaaccatcggaaagaaccttgcagttgacaaggaatccttcgataacaaggcgtctgcaaaggtcaagaagctcgttgacgcagtgaacaagattggtttcgtcgatattgccttgaagaaattcgaaggtgatacgatggagatcctcgacctcctgacagtagctaagaaggtcacgcagggtgcttcctatgcaatgtctgatcactttgtttctctgttgggcgatgcaatggctggcaagtttgatatcacgccagtgatcaaggacgaggaagacctgttccttatcttcaaggcattgcagcaagcagcattctacatgaatgcaacatcccgtgctacggctggaactatcatgccttggctgtatgagaagatggcagctgttggatctttgaactggaagatgaacagagcgcctaacccatatggtgagtatcctttcccgcaggctactaactatttcaagtatctgctcgaaaagggacacaccacagcggcacgccatgttgctccttggatgatctactacggaacaggtagcgatatcttcaagatgatcattgcgcagttccctgagctgaaggaagaagtcttcaagcgttctggacagatcggtcatggcggtacgacatttgctgcgattcttgatcaaaagtttgatcctgttgctatgccttatatcagcctcgacgcgctgacctcatttgttcgttcgattgcaatgcacggatcaattgaagatgctgtcaaggctgcacgctgggcaagagcaaagatcatgaaggaacaacctgatcgtaggccttgggaacaagctggtccttctatggtaggtcttctgggaactgcatggttcgttgagccaagcgatcctcactatgatgaagcgctcaaggtggcttcaaagtggctgatctctactctcaagcaacaatatagcgaaagtgacatcaaactgttccaagcctacaacccagagttctggaaggtatggatttcagaaaagaagaagggcgctgagaatagtcctcacgctacaacctcactccgtggtatgatggacacttctgagtattcggaactctacatcaactgcctgaaaggccagggtctagatgcaatcaaggcaaacctgattgattcgaccacaggttgggctgctcagttgatgcaggttgcggattcggatgacattacgattgacgccaagaaggagcttgttcgtagattcgctcctgcgatggaagtcaacggcgttcacaccatccgagataagtcgcaccgtgactcgctcaacaagaactttgctgatgttctgctcgacgtctatgactcggataaggaccttgcagacaaaatctttgctgacctgcctcgaaccactcgtactctgatcgtaaagatgcagggtgagatggcttacatcgaagcaatcaaggacgacctctacaagcatcctatcaagcctgacttcccgcttgaccatgcccgtattcgtacgatcttgaagtacaacaacctggctatccgagtcacgtctaatcgaaacatcgttcagaccatcggtgatattgattcggcagctaagtcttcgatcagcaaggctcttgtggacctcaaggtctccgaagtgaaacaggatgagacggcgcttgaactcgagacaattcgtctcaataagttccgaaacaacaagcacggcgaagttgcattcaaggttctcaaatcgtttgacgttgcattcccaggcgcaagcaagagaattgctgaattccgaaagaacaatcctcaggatggtacgcttgatcctgtgttccacggaacaggtacaattgccgcttcgatggttctgcgtaacggattccagatcattcctgcaaacgactcctcagctgttggtcgtatgcttggtaacggtatctacttctccaatgtcatcgacaaggcacagcagtacgtcggcgacaagggtggtggcatcacgcgtagctatggtacacgtggttacatcttcgagatggaagccgaactaggaaagaaccctaaggactatcgttccgctggtctcggtcgcgactctatccgttctccggaatgggcagtgtttgatccggacaatcagcttcgtatctacaaggcatactacattgagcttgtaagcctcaatgcggttaaggcgatggctgcaaagcacaacaccaagttgaatgaatcggtaggtagctcatttgaagattacatgatggagaaaactgtggatacaaaggcaacatcgaagttctggttcatgggcgattcgttgcccaagtcgatgacggaaacttgcgaagtcagcgagttcaagtcgaagcgaaacgtctacacagaaccatcgtgggacggcggtacgatcgtttctatcgaacattcgctagacattgagccggtaacgatttcgattgatgacacggcgaagtggctgttcaacaagccagatgaagctaagttgttcttcgatctgatgaactgatctactaccaataatagctgggctcggaagggtccagctattatactatacgcacatcctatgagagaccccgcatgagcgacgcaccatttcatctatccattgataccgaaaccctcggtatgcgtgaaaacacggttgttctgtccatcggtgtagcagcattccagctggtgccaggtgcgaagaacgactatgacaagatcatccgtgacggcttccatgtgaagttcaatgtcaaggaacagattgtcaattacaagcgcaccactgaccagagcaccattgattggtggaaaactcaggaacctgcagcgcagaagattctcaagccttcagaagaagatgttgacatggcttctggtctgacaatgctcaatgactggatcaagcgttcggggtatcgctggaaagattcatttgtctggtcgagaggtacatactttgacttcccgaagctcgaacacatgtatctgcaagcgggcgtgaagtgcggcttcaacacctggaagattcgtgacacgcgcacgatgattgacgttctgactggctcagaaaacggacagtacgaaccagcaggtggcttcccgagaaacttcttgaagcacgacgcactgcatgacgctgcaatggacgcctaccgcatggttgagatcttcaatcttgctgcaggcggcgaaccggacgatggtccgccctggaaggaataaaatgagactctacctgattgtaaaccgctatagcatgagtgtccaggcaggcattcaggggatgcacgtcatccccgagctgtacgaaaagttcttgaatccgaagtggaaccgagcctacctgtcgaatctttctgactgggcacagaaccacaagaccatcatgctgctgcgcactttcggcggtgacgaaagtatcgaagagctttacgaaaagattgcaccgcctgcgaaaggtttgcaaatgccgttcgccctgttccgtgaaggcgcgctgcgaaactgtgcaactgctgtgggcgttgtagttccgtcggcttactacagcactccgatcgaagaactttctggcgacctgctgactctccgcgaaactttgagtcctttcccgttcgccatctaagattgttctttctttgtcatcgtttaaactgtgaacacatcaactaaaggaacaccgaagtgagcttgtcctacacccacagcgaacgcactgtcaagaagtacaccgtcaatcaggcatgcacctcggcgcgttatcgtctcgagaagagtggcctgaccagcatgtgcaccaatgcgatcagcggtcgttcgggcagcgaaatgatcactctcgaagagctgaacaagatcgctgacgccatcgtcgacgataccttcctgtatgatggccacaaggcccgccgccggtgataggaatgggtatggaagtctacttccgtagctttgtcttcgaaaccctcgctccttacttcgacaagtacaagggaatcaagttcaaggttgtgcgaatcgttgaaggttcgcacatccagcttgaggctattgatagcgacgtcaaggttgacggtctcgtccatgcagactatctgaaaagagcatgacccaggatatctacaagcaacttcgtgacctcgccggaaagatggatgtaaccatcatcactgccaaggctccgccccgttgggaaccggaccttcagggcggtgtccgtatcgtcgattacctcgacatattgactccttcggctggtcttcgacgtggcgagctgactgtgatcagcgcaaggacgtcttccggcaagtctcttttgtcggaggcttcctgtggcgctctctgattacgttctgttcctcgatgacgagcgtgagccaggagacttcttcaagaacgtcttgattgcccgaaactacgaagagttctgtgagttgattgctactcacggaattccgaagtacatttcgttcgatcatgacctgggcgaaggcaagaacggaaaggactgtgctgcattcttggctcagcgtttcttcgatcaacctgaggatgttgatgcgttccgatatggcgttcattcgatgaacccaatcggtgcagagaacatccgctccttcctcgaaagcatgaaaaggcatttcgcaaatgagtagcatcgaacagctcaatactgtcttggacaagatttctgtcaaagctcagtatgaaaaaatcggacaggacgaaggagttcgtgtcacgatcatgaacagcgacatttcgattgtgctcacctgggatgcgattgaagccctgagtcgttatgctgacaatcactggatggacaaggtgaagtccaagaagcgtttccgtaactccatggcatacgagttgagtcgtgcaggtgggaatgtcacctactgctatcactactcgaaacatcacatctaccgaatggcagaagccgactgggaaacactaccgggaatcatctgatgaacccaaccaaacaaatcgcgcttgagttggaacaggcacgtcgagaattccttgatgagccgtttactgccaagtggccagaaggccttgagcaggaacaaatctatcaactcgactgtgacgataagggtcgcagtggcgcgaattggttgaaggtctacaccgccggcgatggcgatgtgcatttgatgatgcaagactgggaagagtatcccgagtttcaacctgagttcatgccttcgctgcgttgtcgaacctatatcggtggaggtcggaattggcgtacccaccaggcattgctctggcttgcccaggcaattagactagacaacatagagaataggcgcaaccatgtttaagattttcaatggtacggtcaaccgtacacacttcggtgccttctacgggatcatggtgacccatgcttcgcagtggaacatcgacgaaggaactgacctcattcgttttgaggtttcggtactagatgacaaggctgacagtttccgagatcagctgtgtagactagtcccatgcgtagagttcgataaggagcctacggcttgggaaatgctaatcaattttttcaccaaaaagaaaggtaacgcctgtgaccaatgctgctgataatgctgtcgagtaccccgttctgaacgatccgaagatcctggccaaggtgaagggtgtctgtcaggacattagcaatgtgatgaccatgatcgaagcttcgcgctcgaccatcaaggctcacatcgacaacctggcggaagagatcgacattccgaagaagctgatccgacagatgagccgtacctatcatcgtcagacctttgaaaccgaagtacaggaaaaggacgctttcgagcagacctatggaaaagtcttcggcttcgacaacgactgagaacgaaatgttgcgcctcatcaacgagctttatgaggcgctcgatttcgatgctgagcactgtgactttggtcctgcctacggcatgtgggaaacgcgtcgtcgaaaggctatgcaggaagcacgtcgcctgttaaaatcaaaaaacttcaagcggagttgattatggctattctcgcagtgctcctcggtattgtcattgtcggtggcacgttcatcctgctcgccgatatcttcatcattcgtcctctcgagggatacagaaaggatcggtggtacgaccggttcgtcatgtaaagaactcctgtggtggttgggcacgagacccctagaaataggggttcttgtgtgataggctagtaagtgtctgattcttggtgccacacagatacgtaagtgtctgattcctaaggttgtcctgcacatagaaagaaactaatatgtggctgtaggcaataccaaccaaggaatgcagaaatgacggaagaaaagacgtatcgggttcgcagtcgtgtcctggctcttcctaaaggagccgacaaggcgaaacagctggagtatgcgctcaagcgacgtcgtcggcagaaaaagtcttggcctcagcctgaagatgcaatgctgattctccctctgcacttcaacgtctattcgttcagtcgtcagagcttccacgccgaagcctgcatggaaattccgaccaagaaaggtttcgagtatttcactgtcagcggtggcggcaggacacagtttgctgcactgaggcaggtcattgaaaagatcgaggcgtcagactggttccatcagatgaaggaacagaaagtctacttcaagatcactggcggcggtatggaggaaatctaccgaggttacctctgatctagtatcgtagttcatttgtagatgccaaccaagtctttaaaataacggatgtagtaaacacattcctgtggacattcgttatgacagaacagacaaagacaaagcgcaaatacaccaagaccttgaagtgggaagtgaacaacgagcaattctctgggttgacccaggcactcaatcgagtgaatgaactgctcaagactggtgcttcggaagacgtccgaatcaaacgcatcaagccagcaatcacgttctaaaggacacgggcgagagatcgccccttccttttgtcagaaattcaagctaggagctaatcatggcaactcacgttcgtattgactacgacgaacatcgttacgttacgcgtgccggatcaccggatgatcgctgggatcgcgacgatactgctgcagacatttccatcaacggcattgaaatcgtttctgaggcgcggtaccgcgaccttaccgttcccttcgatgtagacattaacaagtcctacattctgctttgggcggattacaacaccggcgatagctttggacacgacagaaactacgtcga

SEQ ID NO: 5 - DNA, 63753 bp, unidentified
  misc_feature 1..63753: note = the genomic sequence of a bacteriophage
  source 1..63753: mol_type = unassigned DNA
gcgggctgggccaggctgttcggcgccgagccccgcctcgtcctgcaggtggaggtcgacgtgcccgacggcccgcccgacgccaacggcctgccccagtggctcgccacccgcacctgggtcgacgcccgggtccagcaccttcccatcatcccgctcgacgtagcctgaggcccccatggacatccagcaagccgaccacttccccgacccgatcgaccgcgcctcggccgagtccctggcccacgacgaggcctccatagacgctgcccgcagggcggccgaggcccgcaacaggcggtgggcgccccgggaggacggcgactgcgcctgcgggtgcggcaacgaggtcgacccgcgcaggctggccctgggctacggcctgaccatcgagtgcgccaccaggatggagcgccgctgacatggagaccccgaccaaggagcagaccgatgccctcctggcggaccagctgcgcgaggtccgggtcgcctgggcccggcgccgcgaggccgagtcccagctgagccgcctcgccaagtacaagaccatgaccccgggcatgagggacgaccacaagcgctggctcaagcagctcatgtccgccaacaccgtcatagaccgcatcctgggagcgtgaaccgtggccgaggtcaccaacatttccaagcgccgcatggagcgggacgtctactcccgcgaccccgacgtctacctggaggcctggctcgacgaccggggcgagatcctggcgacccaggtcaggggcaccgaccgcgcgcccgccgagaccgggcgccaggcccacgacctggcggacaccctcctgggcatgtcctcccagggcgcgtccatcctgggcgaccagaactgggaggcggagccggtcttcgcggcccacctcctgcgcggcggctacatgatgacccgcgccaggcgcttctggaggaccgaggccagggagcccctgggcaagcgcctcaagtgcgcctggtgggtcgcacggaacgcctggcgggccctggggaccgtcctggcggcctgctactgcctggtcctgcaccccgacagggccttcccggccgacgaggaggactgatggcataccagccaccccactggcgccgcaagaagaccccgcagcaggccgcccaggagggcccacggaccaaggcctggatcccccaggccggcagccaggtcctcttcctgacctgcccggtcttcgagtgcctgttcgagggcacccgcggcccgggcaagaccgacgccctcctggcggacttctgccagcacgtgggccagggctacggcgccgcctggcgcggcgtcctgttccgcgccacgtacaagcagctctccgacgtggtcgccaagagcaaggcctggttcaagctctggttcccgggcgccaagttcaacgagagcgactacgtgtggaccttccccgacggcgagcagctcctgctgcgccacatggcgaaggtcgacgactacgacaactaccacggccacgcctacccgtggatcggctgggaggagctcaccaactgggccacctccgagatgtacctcaagatgttctcctgctgccgctcgacggtgccgggcatgccccgcaaggtgcgcgccacgaccaacccgtacggcaaggggcacaactgggtcaagctgcggttcaggctgcccggcatgcggggcaagatcatcaccaccccgggcgagcccgaccgcatcgccatccacggccacatcagcgagaaccgcatcctgctggacgcggaccccgagtacatcaaccgcatccgggcggcggcctcgaaccccggccagatcgcggcctggctcgacggcagctgggacatcacctccggcggcatgttcgacgacctgtggcggacgcagacccacgtcgtgcggcccttccaggtaccgcgcacctggacggtggacaggtccttcgactggggcagcagcaagcccttctcggtcggctggtgggcggagtcagacggcacggacctggtgttcccggacgggcgcaggatgcgcacggtcaggggcgacctgttccgcatcggcgagtggtacggcctcaagaagggcacggagaacgagggcctcaagatgctggccgcggacatcgccgagggcatccgcctgagggaggtgggcatgggcctcgccggccgggtcaagccgggccccgcggaccccgccatctggtccgaggagaacggcaactgcatcgagcgcgacatgcgggccaagggcatcaggtgggagcgggcggacaacgcgcgcaagcagggctgggagcagttccgtaagaggctgaagaactccctcaacctggacgagatggacgagcccaggcccaccgtgcgcgaggcgcccggcgtgttcgtggtgggcgagcgctgccccgacttcgtgcgcaccgtgccgcccatgccgcgggacgagaaggacccggacgacgtcgacaccgacgtcgaggaccacgccggcgacgactcccgctaccgcatcatgcacaagcggaaggccgtccggcagggcagcttctgaacgacggtgtgcgggccacggacggcccggcatcattaccccatcctccgacacgctgaccgacgagacagcgctaggctggcaccgagtaagaggcgacgcccacgatctagcggtccaggggctgaccatccgaaaggtccacgcagcaggatcaacctcccgtcacgtccccgcccggaggtccacccgagggcggggacaccatggtccaggtcgtctaatgtggattaggacacctcccggttaggtttgaagccgccaggaggagaagcaggcccgcaacctgcccaggacccacccaacagtctgtaccggcgagctcccttatgatgttcacaggagtgcacgcctgagcaggcccgccgacgacgacccactccccgggtaacggtcgcagagcctgcaggagccctagggagctccccggtgcagactggcaggacaggatcggcgggaccactccaccatgggggagtggagcaaactgtcgtccagcctggcgggctataagcgcctccgacccctgccagcaccctcgaagcccccgccgatcgggggcttcgccttttgtggagttcgatggcgttcggccacggctgggcccggtaaactgagctccctaccaaggagtccgaccatgaagaccttcgacccgggcgccatcgtgccctaccagatcctgcccatctccgaggaggaggccaccaagctggtggacgagcgcaaccaggcacgtcgcagccgcggcggcctgagcatgctggccgagaagcaggagatcttcctgcgggcggtggccagggagcgcgccgaccgggcgtggctcgaggccaacacccctatgggcaccgtgttcgacctgctgggagtgtcccacatggtggtcagcgtgccccactacatcagcaccgcggagagcccgagctggggtccgctgatggtgaacgtgatggcccccgacggccggggcggcatcgaccgctccatcctgagctgcgcccagctgcgcgccatgctcgagcccgggttcacgcggccgtgaccgcctactcctccgtccgcaagggcgtccgggcctggctcgaggccaacccgggcgagcactccatctcccacatcgcctcgcaggcgggcctcgaccgtgacgcggtcacggacgtcctgggcaagatgcgcagggcgggggaggcgtcctgcaggccccaggggcaccggaagctgtacaggctcatagagggctccgtggacacgtccaggaaggtgggcggccgggaccgcgaggccaagcgggagtacgacaggctctacttccagcgcaagagccaggagctgcgccggcagaggctctccaggctggcggacgaggcggcccctcagcccgagcagcccagggaggagcgcgccgagaccgtggccgagttcaggcgccgcggcggggagatcgagatgctctcggcccactgggactgaacgacggcccgcggccgacgcctcccgcggcatcatgcgcctaccgggtctggacagcccggtcatggtgattccatcggttgagttggaagggctgagagccccgatcccacaagggtcggggctttctttttcgccggctcgcgctacgagcgtgcgcgcgtcacgatgcgcgctcggcccgacgcccgggccaaggcccaaccaccggagtgaatccatgatcgaccctaagacggggattgtcctcgaccccgcgcgcgacgccctgctcaccgagttcggcaccgccaccctgtccaagcagtactgcctccccggcgagaccttccagcaggccttcgcccgcgcggccaaggccttcagcggcggcgacgacgccctggcccagcgcctgtacgactacgccagcaagcagtggttcatgttcgccaccccgctgctctccaacggcggcaccaaccgcggcctgcccatcagctgcttcctgaacgacgtcgacgactccatcgagggcctggtcgccaacttcggcgagaacgccctgctctcgaccaacggcggcggcatcggcaccaactggagccgcgtccgctcgatcggcgaggtgaccgccaagggcgtggacacccccggggcgatggccttcatgcacgtccaggactcgcaggccatagcctaccaccaggggcgcaccaggcgaggtgcccacgcggtctacctggacgtctcccaccccgagatcgtcgagttcatcaacatgcgatcgcccaccggcggcgacgtgcaccgcaagaacgagaacctccaccacggcgtgaacgtcaccgacgccttcatgcgggcggtggaggacaacggcccctggcagctggtcgacccgcactccggccgggtgaccgacacgatccaggcccgcagcctgtggatccagatgctccagcagcgcgcccgcctcggcgagccctacctgttcttcatcgacgccgccaaccgcgacctgcacccctccctgcgggccaagggtctccgggtcaaccactcgaacctgtgcaccgagatcaccctgccgaccacgccggaccgcacggccgtctgctgcctgtcctcgaccaacgtggcgaagcgcgacgagtggtgggacgtgcgggagcagttcatcggcgacctggtcaccatgctggacaatgccctggaggtcttcctggagcaggcgccccacggcatgtggcgcgcggtcgcctccgtgttcggagagcgctccatcggcctcggcaccctcggcttccacacctactgccaggaccagggctgggcgctggactcccacgaggccgcgaccttcaacgtcgtgctgtactccgagctgaaggcccacgccgtggccgcctccatgcgcctggccgccgagcgcggggagcccgaggacctggtcggcacggggatgcgcaacgcccacctcctggcgatcgcgccgaacgccaccagctccatcatctgcggcggcgtcagcccgagcaccgagccgatggtcgccaacgccttctcccagaagacgatggctggcacggggatcatgaagaaccccgcgctgcagcgccgcctcgccgcgctcggccacgacaccgacgacgtctggcgcagcgtcttcctcgagcgcggatcggtgcagcacctgccgttcctgtcggcctcggacaaggctctgttcgtgaccgcctcggagctcgacccgggcgtcctggtcgagctggccgcgcagcgtcagcccttcatctgccaggcccagagcctcaacatcttcctgccggcggacgtcgacacgaggaccatgcaccaggtccacatgcgcgcctggaagctgggcctgaagtccctctactacctgcgctccagctccgtcaaggccacctcggtcggcgtgatgccggagatcctgcgcgagcccgccccggcgccccaggccgaagagacggttgacctgcccgaggtgagcggcgcagcatgcaacctcaacggtgagtgcaccgcgtgtgaaggctgaggaacaacccatgatgatcgacaacagtccgtccctcttctcgaagagagcggagtacaagcccttctggtacccctgggcgtacgaggccttcgtggcctcggagcagatgcactggctggtgcgcgaggtgcccatgacgcaggacgtcaagacctggcgcgccgacctgaccgaccgggagcgccacctgctgacccacatcttccgcttcttcacccaggcggacgtggacgtggcctccggctacatcgaccggtacctgccgacgttcaagcccaccgagatccgcatggcgatggcctcgatcgccgcccgcgagggcgtgcacatccaggcctactccaccctgatcgacgagctgggcatccctgaggtggagtactccgccttcatgggctacaaggagatgctggacaagcacgagtacctgttccagcgccgggacggcctggagggcctggcgctggacatcgcggtcttctcggccttcggggaggggctgcagctcttctccagcttcatcatgctgctcaacttcacccggttcggcaagatgacgggcatgggccaggtggtgagctggtccatccgggacgagaccctgcacgtcgagttcatgatgaaggtgtaccaccagctgctggccgagcatccccacctccgcacggcagagcactccgagcgcatcagggagatcgcccagaagatggtggagctggagttcgccttcatcgacctggcctacgagtccggcgagaaccagggcctctccgccgaggacgtcaagcagtacatccgctacaccgcggaccagcgccttgcccagctcggcgagcgcgccctgttcggcgtcagcaagaaccccctgggctgggtcgacgccatcgtcttcgggaaggagcacaccaacttcttcgagaacagggcgacggactactccaagggcgccgtgacgggcagctgggacgacgccttcggctgaccagcgccccaaactaggaacagcggcatctccagaggaggggcggcggtacactgtgaccgtcgcccctcttttactatccgggcctggcggcacccggtcaggagataccagtgaaccacatgcagcagaccaccgggtccgaggcccggcgcgaccggccctacgagatgggccacgcccgcgtacctaccttcgccaagcgcttcgacgacgtgccccaggcgatgcacgcggccctcgagaaggcccagctgaacgtcgtgccgaacgccttccgggtgaacgtcgggcgcgacctgttcgacctctacctggagcagttcgacccgctggaccgccagtaccacgactgcaactgctgccgctcgttcgtgcaccgctacggcagcctggtcaccctgacctcggacggccggaccaagtcggtcctgtgggatgagaccctgctgggctcccgtcacccctaccgcaaggtcgtcaaggccctgcgcgaggccgtcgagcgcggccacgtggtggaccagttcttctgggacggccgggccgactggggagtccgcgagcagggcggctggtcccacctgtggaccaaccccggcgtgcactcccacacctccggctccaaggacgcctcccaggtggcggccgagcagcgcgagaaccggaagcacctgcacttcgccctccgggagttcaccctgggcgacctggagcgcgcccgggacatgctgatgacgggcggcctcaaccaggccgacaagacggtcaagatggcggagttcctgatcgaggcgaagagggccatggcccacctctccggcgaggccgtcaaccgccgcctgtggttccgcgtcgccatggccggcaaggggtggtgcaccccgcgctcctcgctgctcggcgccctgatcgacgacatccgctccggcgcctccgtcgagtccatccgccgcaaccacaacaagcgcgcggacccgctgacctaccagcgcgcccaggcggcgccgaccgccggcaacgtggcgcaggccgagcgcctgtttgagcgcatggggctcgcccggtcgctcgagcggcgccccgctcgggccgacgaggtcgtgttcgagtggcagccgcagccgcccaagaagaaccaggcgggcggggtgttcggccacctgctgcagcacgagcggctgtccaccgagcgggcgctgctcaacacccgcgccgagcgggtgacctacgccaggttcgctagggacgtcctgccgcgcgccctggagatcgaggtcgtggtgccccaccagggcaacttctgcgcgatcacgactgccgtccaccccgacgcgccgccgatcctgcagtgggactccgtggagtgccgcaacccgttcgcctggtacgtctaccaccagggctcgccggcgtccaactggggcctccgcccgggccgcgccaaggtggtcgggatcacgaagcagccctcccagtggggcggcgggttcgcccaccacggcaactcggtggtgctcatgatcgagggcgcggccgaccagcgccaggcctcgctcgccctgttccccgagtgcctgcgctcggagctgcacgaggtgcgcgccaccctggaggcccactcccgctcggcacgcctggagcgcctgccgcgcggcgtccagcacgcctccggcctgaggctggacgacaagaccccgctggaggtgctggtccgcaccgagggcggcgtggcgaggtacgtcctggaccgcatggactgatggtacgcggttgactggggagggggccatgataggctcctcccctctctattacccaaggagaacaccgatggacttctcaccacccaacttctggctcaccctggcgatcgtgctgttcgccatctcgctcgcctggctggcacggtcgatccggcggcccggcaacatgtaccgcgccggcatcgagtacgcgctggcggagctgcacctggcggaggacgccgaggaggcggccgaccggctgtgggagcggagcgcctccgccttcgaggagcccgagggcgcgctcgagttcgaccgcggcatccgcgagggcatccgcctgtactgcagggcggacgagaccggcatccgcgagctggaggagctgcgctccgagctgacccgcatggtagccgaaggcgatgccagcggctccgaggtcaacgtggccctcgacgtgatcgaccggcgcctcggcgtcggaatgtacctgacccaagcgggcgaggaagccctggagcaagcccgtgaacagtaagcccctctacatcttcgacctggacggcacactggcgaccatcgaccaccgccggcacctcgtcgagtccgaccccaagcagtggcgggagttctacgccgcctgcgaccgcgacaccccgtgccaggcggtcatcaggaccgccaacgccctgcacctggcgggcgccgacgtgtgggtgtggtccggccgctccgacgaggtggcggacaagacctccgcctggctgctgaagcacctgccgtggctgcgggagcacgacccgttcatgggcatggccctgcggatgcggttcgcccacgatcaccagccggacgtgaagctcaagcgcctgtggctctcccagctgcacccggacgaccgtgccaggctcgtggccgtgttcgacgaccggaagtcggtggtggacatgtggcgggccgagggcgtgccctgcttccaggtcgcgccgggggacttctgatgagcttccgacccatgctggcggcgtccatcgacgacgtcctcaagctgcgcttcccgctgcagacctccccgaagctggacggcatccgctgcatcgtgcgggactccgtcgcggtgagccgcagcctcaagcccatccccaaccgccacgtgcaggccgtgctcggccagccgatgtacaacggcctggacggggagctgatcgtcggcgacccggcggacaggatggccttcaacaacacgacccgcggggtcatgtcgatcgccggggagcccgacttccgcttccacgtcttcgacgacgtgacgcaccccgagatgggcttcaacaagcgccacgacgaggccggccggcgcgtgatggcgctcggccggccgtgcgtcatcgtgccgcactgggaggtcaacaccccggaggagctggtgtcggtcgagacgtccgtgcttggcgaggggtacgagggcctcatggcccgggacgcctgctcgccctacaagttcggccgcggcaccctgagggcgcaggacctgctgaagctgaagcgcttcgaggacggcgaggccgagctgctccgcatggaggagctgatgcacaacgccaacgaggccagcacgagtgccctcggcctgacggagcgcggccacagcaaggagaacctcctgggcatgggcaccatgggcgccctcgtcgtgcgggccgtcaacgggccgttcaagggcgtcgagttctccatcggcacgggcttcaccgccgaccagcgccaggacctgtggagccgccggcacgacgggctcgtcggccgcctcgtgaagtacaagttcttcccgggcggcagcaaggacgcgccgcgcttccctgtgttcctgggcttcaggagctcggccgacatgtgacgggcggaggctgctggctcacaaccagcagcctcccgggctaccatcgcgagcatcagctcacaactagcccaaggagcccgcgatggccgacggacccaagaagaagcccacggtcgccacgccgtccggggcctacctgcgcatgcagcccctgtggaagatgatcgacgccctcctgggcggcacgaccacgatgcgcgctgccgggaaggagtaccttccccagtacgacaacgagaccaacgcgaactacgagtcccgcctcgagcgggccgtcctgctcaacatgacggagcagaccctggacaccctggccggcaagccgttccgggagcagatcgtcctgggcgaggacgtcgacgccgacttcgaggagctgtccgaggacatcgacatgcagggcaccaacctgcagtcgttctgccgggcctggttccgcgagggctgggccaagggcttctcccacgtcctggtggaccaccccacccccgaggagaaggtcgacgctgccggcgtggcggtcgcccggaccctggccgatgacagggccgagggcatgcgcccgtactgggtgcacatcaagcccgagtgcctcatcgccgcctacgccatgatggtcaacggcaaggaggtgctgacccacgtccgcatcaaggagaccaccgtcgagcgggtcggctgggaggaggtcgagatcgagcgggtccgcgtcctggagcccggcatctggcaggtatggaagctggtcgacgagaagaaggacgagtgggccatcgagagcgagggcaccacgaccctggacttcatccccctcgtgacgttctacgcaggcaagcgcgtcgggctgatggacgccaagcccccgctgatcgacctggcccacctgaacgtcgagcactggcagtccaagagcgaccagcgcaacgtcctcaccgtgtcgcgcttccccatcctggcggccgcgggcgtgcccgccgagcagaaggtcaccatcggccccaacaacttcctcaccaccgaggacgtgcagggcaagtggtactacgtcgagcacacgggggcggccatcgcggcgggccagaccgacctggaggccctggaggaccagatggccacctacggggccgagtacatgcgcaagcagccgggggacgagacggcgaccgggcgcgccctggactcggccgagagctcgtcctacctggcgtccaccgtgcacgacttccaggactgcgtcgagctggccatgaagtacacggccaactggcttggcaaggacgacggcggctcggtgcaggtcgactccgacgtggacctcggcgaggcggacgccgccgagctggacaccctgaacaaggcccgcgcgcagcgggacatctcccgcaagacctacctgggcgagctccagaagcgcggcatcctggcggacgacttcgacgaggagcaggacgccgagttcctcgaggaggaggccaagaacacgatgggcgacatgttcggcggcggcaacggcacgggcctaccgggccagcagcccccgggcaaccagccgcccggcaatcaggacccggcccaggtcgacccgcccaccccggatgacgagtgatgcccaagaccgctaacgaggagatcctcgacgcgaccgtacgccaccagatcaggctgctgcgcttctcccagggggaggcgcagaagtccgccgagctgctggcccagagcgacgccgagctggtcgccctgctacagtcgggcctcaccgacacctcggaggcccgcatcaggggcctcctgaccgaggtgcgccggatgcgcgccgcggtcgccgagcgcatccaggtggagctcgaggaggacatggagggcctctccaagaccgaggccgagtgggaggtctccatgctccagggggcgacgccgatcgccctctccttcaatgcggtgcccgccacggtcgtcaaggccgtcgcgggctctcccatcaatggcatcccgctccaggggtggctcgggaagatggcgaccaacgacgtcgcccgcatcgagcagcagatcaggctgggcgtcctccagggcgagaccatcgaccagatggtgcgccgcatcaggggcaccaaggccggcggctacaaggacggcgtgctggagaccacccgccgggaggcggagatgatcgcccgcacggcgaccaaccacgtctccaccgccgcgcgccaggcgacctgggatgccaacgccgacgtcataaagggcgtccggtgggtcgccaccctggacggccgcacctcccccgtctgccagagccgggacggcgaggtctacccgatcgacaagggcccgcgcccgccggcccacccgaactgccgctcgaccgttgcccccgtgctgcacggggaggagatcgtgggcgaccggcccacggtgaccgacacccgtacccgccgccagcgcgagatcgacttccgggcggaggccaaggaggccgccggcgacaagtggaagggcatgtccgcggccgagcgcaacgccgccatcaaggcccgccgcgacaagtgggccgacgagaacatcgggcagacccccacctcgacgaactaccagtcgtggctgaagggccagtccaaggagttccaggacgaggtcctgggcaagggcaaggcgcagctcttccgggacggcctgccgctggagaagttcgtcgacgagaagggcaagccctactccctggcggagctgaaggccgagctggagggcgacaagctgaacgtcatccagcccggcgtgggcctgaaggccaagtcgctgctgcagcagggcatgtcgccctccgaggtgctggaccagatcaagcaggagttcccggacgcgtccacctcggcggcgtccatcgcctcctacaagtccgagctgaacaaggccggcgcgctgaacctggggcccgcgtccaaggtgcccgccggcgccctcaagcaggccaaggcggtggccgacgtcgtcgccgacctggacgcctccctgccgccgaacctgaagcacgccgtcggcggccagtggtccaccgtcgtcgacgacctggacggatcgcccggcgcgtacgggtactaccaggccggcaagggagtggtactgagcgggaagaagctgtccgtcctgccggccgcgcaggccaagcaggtcgcggcccacgagctcggtcacctgctccacaagcagcacgacctgctgctcgacccggacgttctggcggccctgaaggcctcggcgaagggcctgtccccggacgcccggaagctctactcgtactacctgacgagcgccgacgagctcgtggctgaggtctacggccaggccctgagcccgagcgccgtgacgtcccagggcctctccgccatcgagttcaacaaggccttcggtcccgcgatccaggcggcgaaggacgcgatggcgaagaagttccccgtgcccccggccggcgccaaggtcccgctcccgggcggccccgccctgccgtacgaggtcgcgggcaagcacacctcggtcgggtcgctggccaaggcgctgctgcagcagggcatgccggacgaccaggtcctgaaggccgtcctcgccgagttcccggaggcgcagaccaagcaggcgtccatcgcctcgtacaagtcccagctgaagaaggacggtctgctgcccaacaaggcctccggcccggtcgtggcggccaagcccatcccggacgtcgtgcccgtgccctcgtccggcgccgcggctgtcgtggcgcccgaggcggcggcgacccagtctgcactgaccctcacctcggcgcagctgaaggacgaggccatcaagctgatgcagaagggcatgctctccaaccaggacctggcggagaccctggcgaagcagttccccgccaacgcggcggacgtcaaggtcaccaacatcgcgacctggaagtccaactggaagaagtcgagccctaactcctacaaccacgcggtctcactctccgagaaggcgacggtcaaggaggcggtgtcgggcccggtgcagaagccgaagctggcagaccagaagctcggcggcacgtccaccctcgccctggacaaagtgaagtccgtactggctgcgggcggcggtccgcaggacgcctacgaggccatgaagtcggtcttcggggtcatcaagcagcctggcgccgacgacctcctggagctggcacagtaccagctggcctcggccaaggccgcgggcaagccctacctgaacgcggccttcaccaagccgaccggcttcgtctccaacggcaagatcgagaagtttacggcccagctgccagccagtggtaaggccgccctggaggcgtacaagaaggcgaagcagcagggcctcggcccgatcaacaccaacaagctggtcaagaagatggcgggctacgagccctccgcaacaatgaaggtcaagctgaaggaggcggcggagtacgagctcaagaagcagggcacggccaccgtctccttcaacgaggcgaccgtcgccaagaagcagggcgtgaccccgaccgcggtggacatgacggcctcccggccggcctccaccccgcgcgacggcctcccgccgcctccgaggtactcgggggcccagcgcgcagcgggcgtgcgcaagtttgccaacgggctgccgaccggcgacctggcggcggtcaatgccaagcagcgatcgatgggactccaggagctaacggcggaggaagtcgcggcggtaaaggcctatactggaaacacctaccgggcgctgaacaacgcgctccgggcgggcaagtactcgtcggacccgcacctgcaggcctacgtggacgcagcccagcacggcatgtccaagatgccgaagttccagggcgtcagctcccgcggcatgacgttcaacgactcgcagctgaaggccatgctgtccacgtaccgcaagggcgccgtggtcgaggactccgccttcgtctcgtcgtcctacggcgagcaggcggcgttcagcggcaacgtgtacatgaggatcaacggcaagaccggcgtgaacgtctcccagtactcgtactacaagaccgagcgcgaggtgctgttcatgcccggcacccggttccgggtggacgacgtggtgcagcagaacggcaagtacatcatcacagtgacggaggtttgacatggcggacgagttcgaggcgggcccggagtgggaggggaagatggacttcgccccgggggtgcccgaggaccccgacgcggcgccggagctgttctaccaggtgctgctcggcagggtctacaccctgaccaggtggcgggacgggtccacgggccggggcgaggtgcagctggccgacctcgaggcgctcgccgggggcccgatcacccgggagggctggtacgacgccctggggaagtacctgggcgcggagctgcccggctccctgtaaaagaggcccgccgcaatggcgggctttctctttctgcttgaacgttggcttgcgtgggcccggcgccggcggtaaggtgccagcctatacaccccgggcgcgacgcccaacagccagcgcgtgatgcgcagaaggagataagatggacttcgagttcctgaagaaccccaccgtcgacagcatcgacaaggtcccggagcagttccgcggcttctacggagagggcgagggcggctacgtcctgcaggacagcttcaagggcaccgccaccgcggtggacggcctgaacaagtccctgaaggcggcccgccgcgacgccgacgaggccaagcgcaaccgcccggacgtctcgggcttcgcccagatcggccagctgctcggcatcgagggcgacgacgccatgaacgccgagaccctgcgcgcaggcgtcgagaagctgatctcggagtcgaaggacggcaaggtcaactgggacaagatgaagcagtccctggagagcggcttcaacaccaagctgcaggcgaaggacgccgagatccagggcatgggcaagtccctgcagaagtacctggtgacctccgccgcggtccaggcgatcgccgcccacaagggcgtgccggacctgctgctgccgcacatcaccgcccgcaccaaggtcgtcaaggacggcgaggactacgtggtccgcgtggtcgacgactcgggcgacccgcgcggcaacgcctcgggcggcttcatgacggtcgaggacctggtcaaggagctcaagggccaccagaccttcggccgggccttcgagagcgaggcgcccaacggcggcggcaagccgccgggctcgggcaacaaggcccccgtcggcaagccgggcgagctgaccgccaaccagaagatcgccgccggcctggcgaagcgccgccacggcggctgatccagcagttgtgcaacgagtaagggcgccccccgggcgcccttactctttacagcgacagcaccgtgaggctctcccgcaggtccgtcaggacctggccgagccagttggtgcctcgccactctttcgggtcgtggcagcggggatcccgctcgtccaggccgatgccccagatgacgtccgtcgggcttgcctcgaccaggagggtgccctccgtcaggaggagctgcgcccgcagcttagggttgctggtgaacttgtgcaggctggcccgcatcacgacgtcgcgggacaccgagtcccactggcggcggtcgaagcccctgacgcggcggccgatggccttctgctcggccgggctctgggtcgccatgatctcgtccagcgcctgctcgtcaccgaagaccctcgccttctgggccatcatgtactgctcggcgcagccgtactccacgccgtcgatcaccatgggcgacgggtaccactggctgaacaccccgccgtagaacagggtgtagcggtcgtatttctcttgcatgggaaaactccttgcggatcagggggttacagtgtaccgtcagactcgcttcgagaccgcgggcgggagcacgggctcgggggcctggtgcacggacaccgcctgcaggacgaagaagcgcgtccccgggtggaggttggcgaggcgcacggcctctccgtcggcggtggcgccgttgaagtggacggccttcggcgggttcttcagcgcaggccggccggccgcgcagccgtccttgtagacgtcgccggaggccaccatgtagaatcgcccgtcggtgatttccgaggttccgcggctggggttccaggccaggtcggcgcgcttacggccggtcgagcggcccacgacggagtcaacgacctgtcggcccttctccgtcaggctcgggggctgcttgccggtcgggtcgaagtcgatcaggtcgtccgccaccaggaacgtgatgtccggcgggggcaggccgcggacgtgctcggcgctagagaagcccatggcgatcgtcagcagggtgcgcaggcgggactctggcgaagtcggggtcatgcggggcttgggcttgggcggggcaggcttgggcgcctcgacgggctcgaagtcggaggccacgatcaggaggcgatccacgccgagctgctccaggcggcaggcgattgcgtgctcggtgcggccgtgcgccctcgacagcttggtcaggttgatcttgccggcggcggccacgaggaggtcgcgctcctcagcctccgtccacggggcaccgccgcgcggggccgccgtcgggtgggcggagttgcccaccagcgtcgaccagccgcgcttgacggcgatggcgtgggacggctggcggaagcgcgagacgatcagggagaacgcggcctcggcgaaggcgtcgaggtagtcgtcggggatcaggtacaggtcttcgaagtccatgggactctccttggttggtagggacacgggcatcatgacgcccaattaggtggtacaatgccactgtttaaggggtacggcgctcctgcatgaggaccttggcgcggtcccacgcactgttccacaggtcgcagacctcctgaggcatgccgtcgtcctcgtcctcgcggccgtaggtagacggatctacgccgagctccccgaaggcggcgtccatcaccatgttggaatcgcagaagtcccccgagtggcacacgtcggggttcagctccctggagttgaggtccacgacggtgtcatagacgtcctgcccgaggttcatcctcaggaggcgcacgaaggcttcggccagcgcctcgacggacggcagtccgccggagggctgagggtcgggcagggagtcgcaccggcagtctccgaagtcgaagccctgaccgcagacgttgcacgagaaggctgccatcacatctctcccatgaccttgaggaacgactctgcgccctcgaagatcatcttgtgcatgtccatgtcctccgcctcgatcatggcgttgtcgttgagggccacatcgacggtggtgaaggatgcctccgccgcctcgatggcgtcgagcgccgtggcgtaggccatgacggtgataggggcgatctcgaggtcgcgcagcagctgcatcacctgcgcgaggtcctcgacgggcgtgtcttccaggttcttgtacttgacggtcatcacaggttcctcagttcgtcggcttcggattcgacgccggacatgtcccacaggtgggtgcgcttgacgcggccgtcggcggtgatcgccatgatgggcgactcgtcgccgagggtggggtgctcgtacaggtccaccccgccggccgagccgaagtaggtggggttctttgccatgaaggcgatagccttctcggtggtgggcttgttccgggccatgtcgtttaccagtttgcgttggtgtgagtccattatacggggtctttcggtacatgggagccccctggaagaactatttttattctttttattagatataaagaaataagggtatctaaggcagtcttaccctccctctagggtagtctgacctctaagtccttgtcgcagctgtaccgtctagggcttctaggccttctagggctgttcgtcgagccgtggccggacctgaaacctggccgatttcctgggacaacgacgcgccgaaggctcgtttcggctcagatacggcttaagtccttggtccgtaaagctttttctcgtctgaggcaggcctccggaggcccaggaggctcagattctcgcgctggaccagcgttcagggggttacgagctcgggtcgtcacggcaaagtcccgaaccatagcacgcgagcacggtcataccctgccgcgctcgctgaccctgcagaggcgtgatgccttggcccaggggtcgaatcgtcgggcgatccggcacctttcccaagcatcccaccacccgcctcccaggagaaccctaatggcatccgttaccctcgccgagtcggcgaagctggcccaggacgagctcgtcgctggcgtcatcgagaacgtcatcaccgtcaacgagatcttcgagcagctgcccttcgacggcatcgacggcaacgccctcgcctacaaccgcgagaacgtgctgggcgacgtccagatggctggcgtcggctcgaccatcaccgccaagaacccggcgaccttcacccaggtgacctcgaccctgaccaccatcatcggcgacgccgaggtaaacggtctgatccaggccacccgctcgggcgacggcaacgaccagaccgccgtccaggtcgcctccaaggccaagtcggccggccgccagtaccagaaccagatggtgaacggcgacggcaccggcaacaacgtcgccggcctgttcagcctggtcgccggcagccagaccatcaccgccaacaacggcgcggcgaacggcgcgggcctgtccttcgaggacctggacgccctgatcgacctcgtcaccgacaaggacggccaggtcgactacctgatgatgcactcccgcacccgccgcaagtacctggcgctgctgcgcgccctgggcggcacctcgccgggcgacgtgtacacgatggcgtcgggccgcaccgtgccggcctaccgcggcatcccgatcttccgcaacgactggatcccgatcacccagacccagggcaccgccacgaacgccacctcggtgttcgccggcaccttcgacgacggcagccgcacccacggcatcgccggcctgaccgccgagaagcaggcgggcatgcacgtcaagtacgtgggcgagaaggaggatgccgacgagagcatcacccgtatctcctggtactgcggcctcgcgctgttcagcgagaagggcctggccgtgctgaagggcgtgaccccggcctaatccgccggcgtcgctgatctcggttagcccgccggcgcaatgccggcgggcgcttaatgggagacaggaaacatgagcgcacacctcgtacgcctgagcggctcgcgctgcgggcagaccctgtacgacaagtccgacgccgtcatcgtctgggtggcggacgactcgaccaccaagccggccgacgcccgcgctgcggcggccgccgctcgccccggcccggacggctactggagcgacgctgtcgtggtggagctgagcgaggccaacctcgccaccgccatcccgatgcggaccgtcaactgagcaccacgggccctgccggtacgccggcggggcttcgtggcctataggccaagagaaaggagtggacatcatgtccagcaagacccagcgcttcgtcctggtgggaccgcaccagggcaagaccatgaacgtcaacggtcacgagttcgtcgacggcgagtacgagttcgccggcaacgacgggcagatcgccagcctcacccgcgtcttcggcttctacggcgccctgccggccgagcaggccgagctgcaggagctgcgctccaagcagggcggcaagccgacccgcaagcagctggacgaggccatcgccgccctgccgggcgagaacaccgacgcggactacgtggtcggcgccatgcgctcccacttcggcgacctgttcacccagggcgacgagctgatggtgcgcgaggtcgtggtcgccccgtcgggcgatgcggaccaggcgaccgtgggccagaacaccaacacgcaggagccgcccgccccgccggcgctgccgagcctggctgaggcgatcggcctgctggacccggccgccgaccaggactggacgtccaacaacctgccgaacctcgagcgcctcgaggctctgaccggcaagaagccgtcccgcgccgacgtcgacgcgatcgccgacggctacacccgcgccaaggcgaaggccgccaaggcctaagcccctgacagacccacaggagaggatcgacccatggcattcaaccagcaggacaacgacggcacggtcgacggcgccaacgcctacaccgaccccgccaccgtgcgcgcctactgggcggaccgcggcgtcgacctctccgccaagacggacaccgagctcgagcaggcgatcgtgaacgcgacgacctacctcgacgcccggtactcttgggtgggctggcagcgacgccggctccagggcacccagtggccccggggcggcgtcacctcattcctccgcggcctgccgcccgccctcacggtggcggtctgcatggtcgcgaaccgcgccctctcgggcaagccgctcatgccggaccccacgttcgacgcgagcggccagaaggtcacccaggtgacgaagaaggtcggtccgatcgagctctcgaccacgttcgccgagagctccggggccaacctggcggccgcgacgccgcagttcccggaggtcaccatgacgctgcagcaggccggcctcgtcgagtccggcaactccggccaactgtcgaggggctgacatggcgaccttcgactaccagtccatgaaggacgacgtcgacgcgctgctggccgagttcggccagtcctgcaggctccgtcgtccgggcggcccggtcgttgttgacccggtcgacggcaccgtcaccccgggctccggcccgaccgacttcccggtcgtcggcgtcataaccgactacagcgacaagcaggtcgacggcgagaacatccgccgcggcgaccggctggtctacatccaggcggtcgagcgcccgaagcagggcgacgtcttcctggaggaaagcggcacccagtgggccatcgtggacttcgactcggtcgatccggcgggcctggccctgctgttcgccctgcagctccggaggtaacgtggcgcgcttcgagcagcagctgaaggggttcggtgtcaagaccctgaagagggtggaccaggtgcgccgcgcctcggtcctcgagctcttcaagctggtgatcttcgcgacgccggtcgacaccggccggctgcgcggcaactggcagacgaccatcaactcaccgaactgggccgcgatcgaccggctcgacctgggaggcggcgcggccatgtcggaggccgtcgccaacctgggctcgctggtcgacgtggtctggttcacgaacaacctgccgtacgtcgagcggatcgagtacgacgggtggagcaagcaggcgccggagggcatggtgcgaaggcacgtggcctcctggaagcggatcgtggccgccaaggcccgggcattcggcaggtaaggacggacaatggctaccaacacctacagcgggctggacatggcgctgcgtcagggggtcaaggactccccgctcgccctgccctacgccgtgccgaacgccccgttcgacaagccgtcggaccagagtccctgggcctcggtcttcatcatgggcaaccagccctccgtcgccaccctgggcaacgagggccaggacgcccacgacggcatcctgcagatcgacctgaactacccactcaacaccggcgaggcggccgtgacggccaaggcggacgagctgactgactacttcaaggcgggcaagcgacttgcccactcgggggtcgagctcacggtggcctcgtgcggccgctcacgcgggcgcgaggtcgatggctggtaccgcgtgagcatgaccgtcacctggttcgcccgggtctctcgaaactaatccacagtaggagcgtaccaccatggcaaacggcagccgccactccatgcgctacgtcgccgagaccgtctacggtcagactccggcgacccccgcgttcaagcccatccgccacacgggcaccaccctcggcctgtccaaggagtccctgcagtccgaggagatccgcgacgaccgccagatcgccgacttccgccacggcgcacgccaggtgggcggggacatcaacttcgagctctcgttcggcagcttcgacgacctgctggaggccgtcaccctgggcacctgggtggcagacggcgccccgggcggcgacggcgaccgcctgaaggccggcacggtccgccgctccttcaccgtcgagcgcttcttcggtgacatcgcgacggccgacaagccgtaccaccgcttcaccggcgtcgagctgaacaccctggcgctggccatcagcgccaacgcgatgattaccggcaccttcggcacggtcggctcggacatgtccaccgcccaggccatcatcgccggcgcgacctacgccgcaccgacgaccacctcgccgctggactcgttcaccggtaccctgaacgagaacggcacgccgatcgccgtcatcaccgagatccagctgaacctggagaacggcctggaggcgcgcttcgtggtgggctccaagaagtcgatcctgccgtccatcggccggtcgaacgtgtcgggcaccatcacggcgtacttcgagaactccctgctgctggacaagttcatcaacgagaccgagtcctcgatcgtcttcgagctcccggacggcgcaggcaacaagtacgtcttcaccctgccccgcatcaagtacaacggcggccagccggacgtcgagggcgagggcccgatcaccctgagcatgccgttccaggccctcctggacagcgtgacccagtccaacatcatcatcgacaaggtgcccgcataagccatggaccagaacaataacaacgccgcgggggcggctggcatgaacgagttcttcacccgcggcaccgccaacgaggggatccaggtccccctgtggcgcccggacggcacgaagagcgagcactgggttcgcatccgcggcatcgactcggacgcgttccggcaggccgacgctgaggcccgccgggacgcgatccggatcgcccagctcgactcccaggtcgagcgggcggccgagatcgccaaggcgaagcgccgcctcaccgctcacctcgtggtcgcctggtcgttcgaccagccgtgcaccgtcgacaacgtggaggccttcttcgtcgaggcgccccagatcatggactccatcgacgtcgcggcgtccaagcgcgccctttttttcgcagccgggtcgagcagctcgcagccttcgcagagcacgagttcaagctcgacctgatcccgaagggaagtaagcagaccctgcgtgcgtccctcatgcaggtgtggaagacgctgaagcgcaagccgcctcagctggaggatgcgcccgagctcccggaggagctcgggtacatctgggagtggttccgtgaggtgttcgccggggtgccgctcaccttccaggagatgcaggcttggtcgcagatgaccggcaagcctctgctgggctgggaggcggacctcatcaagtccctcgaccgcattttctggaaggtgaacaaccgtggcaactgacgtcgccagtctggcaatcaagatcgagtcgctccaggtccagcaggccgaggggcgactcaagggcctgagctccgccggcggcggggccgagaaggccaccgcgggcctcatgggggccttcaccaagctgctggggccgctggccgcggccgtcagcgtaatgggcaccctgaacaagctggtggacgtgcagcgccagttcgacgtgctgaacgcgggcctcatcaccgccaccggctcctccgagaaggcggccatcgccttcgacgccctgcgcgagttcgcccagaacacgccctacgacctgaaccaggccgtcgacggcttcaccaagctggtgaacctgggcctcgatccgagcgagaaggcgctcatgtcgtacggcaacaccgccagtgcgatgggcaaggacctcaaccagatgatcgaggcggtggccgacgccgccaccggagagttcgagcgcctgaaggagttcggcatcaaggcgaagcagcagggtgaccaggtcaccctgaccttccggggcgtcgccaccaccatcggcaacaacgcggccgagatcgagaagtacctgacggacctgggcgagaacgagttcgccggcgcgatggagcgccgcatggactcgctcgacggcgccatggcgaacctgggcgacacctgggaccagctgtggctgaccatcagccagtccggcatcggcgacgccatcgaggcctccgtgcgcaccgcgaccgacgccctccaggagctgaccgacatgatcgcgtcaggccagatggaggcgctgctcaagtcgcagaccgtccagtgggaggtctggggcacggacatcgagaagtccatcgacatcgtcacccagttcatcaaggacaacttcggccagtgggaggacgagggcgagtccgtcgtcgacttcctcatcagcgccttcaaggagctgccctccaacctgcgcgcgatggtccagatcctgaccgtcgagttcgcctccggcatcgacaggatgatcgccggcgccgagttctggcgggacagcatcaaggccatcttcaccgacgacaccatcgccgcctcgatgaagcggttcgtggcggagcaggagcgcctctcccaggtccgcatggagtccatctccgcgatcctggacgagcgcgacgcgaccctcaagtccagcaacgagcagctggaggccgccaagcgcctgcgcgaggagtacgacaaggcccaggaggccaagaagaaggcggcggccggcacggaccgcctggcacagttccgcatcggcggcgaccgccagaagcccgcctcgtcgggcgtggacaaggccgcggccgccgaggccaagcgccgggagcaggagttcgcccggctcaaggagtccctgcagaccgaggaggaggccatccggtcctcctacgacaagcgcagggcgatcatcgaggccaacaccaaggcgggctccgacgagcgcaccaggctgatgagccgcctcgacgccgagcgcgacaccgagctgaagaagctgggtgcctacggcaactcggagctggagcagctgcgccagtcgctgctgaagcaggaggacgccatcagggagtcctacgaccggcgcatggagatggtgcgcgccaacaccgccgagggctccaaggcccgggcggagctggaggcgcaggtcgtcaaggaccgcgacaaggccctggccgacgccgagcggcagcgccagtccgagcgggacagcctatacaactccctcctgaccgaggaggaggcactcaagcagtcctacgagcggaagaagcagctgatcctggagagcgagtcggtgacggagctggagcggcaggacctgctgcgccgcctccagaagcagttcaccgaggagcaggcccagatggagacgcagcgcatccagacccagctgcagggcgcggccacgctgttcgacggcctcgctgggctggccaagggttacgctggcgagcagtccaaggcctacaaggtactattcgccgtgagcaaggccttcagcgtcgcccaggccgccatgtccatctcgaccggcctcgccaaggcccaggagctgggctttccggccaacctggcggagatggcccgggtcgcagccaccggcgcctcgatcatctcccagatcaacggggcgcagttcgccggcgcgtacgaccagggcggccagatcccggccggcaaggtcggcatcgtcggcgagtacggcccggagctggtgaagggccccgcctcggtgcgcggcagggagctgaccggccggtcatacccggacggcggcaaccagcccgcgcagatggcaccgcaggtgcacgtgaagaacgtgaacgtgctggacccgagcctggtgggcgactacctcggcacggacgagggggagaagctcatcatgaacgtcgtcaaccgcaacaagagctcgctgggctactaaccgaggagattcagatggccttcgcaacgggcacggccgccaaccacgtggacgcgctggacaagctgcgcctgttcctgaccgccaacgagagcctggtagccgccgggcagacctggcagcagctgcggtgggtccccgacaacctggactccgtggacacgaccctgccgttcagctcgggcgtttccctccatcgcatgttccggccggacttccggacccagaactacaacgacgacgccaacggtcagtacctgtcgtcgacgtcgttcaccccggaccagtacgtacgcctgaagatgcgcgcagcgcgggccgtgacgcggttcaccctcaaggccgggcagagctcgaacgtccgtaactacacgccgcgcaacttccggctggagtactcggacgacggcagcgcgtggtccaccgccctggacgtcaccgagcagcgcgcctggaccgccaacgaggagcgcaccttcaccgtgccctccgccacgggcgaacacctgtggtggcgcctggtcaccaagcagaccggcgactacggcggcaccctgaccggctcccagtgggagctccggtccctgtggctgtacgacggctcggagctggtgtcgtcctcggagtcctacctggtggtcaagggcccgggcctggcgggcgacgaggagatcttcgcggccttccgcaccagctacaacaccggcacgggcgagtacttcatgatggtgcaggggctgaccggctacctgccgaacgagcagtccccgcaccgccagcccggcctgcacccgagcgggtggccggtcgtgcccctctggggcgcctccatgcccttctggttcgttggcagcggccgccgcgtggtgttcgtgttcaaggtgtcgaccgtcttcgaggcggggtacgccgggttcttcctgccctacgcctcgccacagcagtacccgtacccgatggcgatcggcggctccatgtcgccccgctcggacagctaccggtacgacttcgtgtcggccgcgcacagcgccttcccgatgcccggcagctacaacagcgtctcggccagcgaagtggcggcgttcagcaccaccctcaacgtgatgctgccggacggatcctggttcgacctgcacaacaggccgagctccggcgggcagtccgagtcgtactcccggtggtccagctcccctggctccgtgctgccgcacgggatgttcgacggcaacaactcctcgagcagcgccggctacggcatccgggagaacgttggcggcggcttcaccgtcctgccatcgaccctgttccagcgtcagccgtcggggcggttcctgggcgagctggacggctgcttccagatctcggggttccagaacggctccgagaacaccggcaccatcgaaggggaggactacgtggtcttccagaacacctaccgaaccgacgtacgcgagtactgggccctcaaggcggagtgacatagacatggcatacgagaccggggccgcaacgagcgtcgccgacctgctggacaagctccggctcttctgcatcgcggcaggctggaccgtcaaccggtgggacggcgtgggccagacggcgcgcctcaacctgcagaagaacgggctcttcgtcggcctgtgctcccaccagggcacctccgccctcaacgacaacctgaacgggtacacccagagctccagcaactcctactcctgcctggcgctcagcatggccgacgggtacgacggcgcggacaccggccgaggggcattccgccagcccggcgcgcccagctacaacggctacacccggggctgcatgatctcggagatgacggctgccgtgccggcctaccacttcttctcctactccgactcggacgacatcttcgccgtcgtggagtaccgcaccggccgcttccagatgctgggcttcggcagcctctccaagttcagctcggcggccctgggcggcgcctggttcggtggcacgagcaccaccccgacctgggcgtactacgagcagagcggctacggcccggactcgtcgcagcagaacgagctgatccccttccgcatgggctaccagcggggcagcgactccgccagcttcgtgcgatgcaacgtggactccaacaatggctgggccgcctccaggtacacggcggacacgtccacctacggcccgctggccgccatcggccagtcgtactacgacgagggcctgcgccagtacaccccgagcgctctcggctggcagacggccctgctgcgccagaccgtgtacatcggccggggcaaccagttcgcctcgccctacggcgagatcgcccacatgcgccggctggagatgaccaactacgtgcccggcgacgagttcactctcggatccgacacctggaaggtcttcccgtattaccagaagggcggcgcgaccggccagcgcgggtacgccatcctgaaggaggcctgacatggcagtggtgcagatgaccggcgttttgagggtggtgaccccgacgccggacgcctcggcgctggacacctcgagcaccctgggggcatggacctacccctggggctttcccattgtggagcccaggcactcgcgcgcctcgcggctggccctgccgccggcgccccccgtcgccgtgctcgctcctccgtctttcggatcggaccgccgcgtcggcggcttcgtggatgacctgtactatcgcgtgcacatccggcccggcgtgatcgacctgggcaacctgctgtccagccagacgcgggccgtagaggtctggaacgcccacttcgacggccgcaccctggaggccatcacctcccagggcctggacggcgtgacgctgacccagcccgaggcgccgccgaccacgttcggcgccctggagtcccgcatctaccaggtcagcatctcgaccaacggcgcgccgaccatcgcgggccagtacgtcttcgacttcggcgacgaggagcccaccctgcggctctccggccgccgcgtcgtgctctggcccttcatcccccagacgaagttcagggagtccctggagtggcagacggacctgctgcaggcctactcgtccgagcagcgcctggcgctccgcacggcccccaggcagcgcttcctgtacgagttccagctcgacccgcaccagttctcccgggccaaggccatcagcacgcagtgggcccaccgggtttacggcgtcccggtctggggcgaggtcacccgcctcggcaccgtcctggagggccagacccgcctcgacttcgacgcgtccagcgccgactaccggaacaacgacattgccctgctgtggcaggacgacgagaccctgctgaccgtcgaggtgctgagcgcggacgcctctggcctggagctgaaggtcccgaccgggcgctccttcgagaacgcctacgtgatgccgctccggtacgcccgcaccctgaacgggtccgagttcgcccgtcggcccgacgacatgaccctggcccgcgtggagttcctggtgacgaacaacgtggacctggccgcgtccgccgggctgcctcagtaccgggggcgcgatgtgctcatggacaggtccgtcatgctgtccgacctgtcggagaagatcatccggccggtggaccagttcgacaacgggtccggcccgatcaccgtcgacccgcagcgcggctacccagagagcacccagaccatcgggctggacgcgctgtcgagggccgaggcctggcgctaccgcacctggctccacgcccgccgcggcaagcagaagggcttctggctgccgagctggaaccgggacctccaggtgctcaccaacgtcgactcggccgccacggccctgacggtgcgcccgatcggctacccgctctactacggcgtcaccgacctcatgctcgtgctgaccgacggcacggtgctgtacaaccgcgtgctgtccggctcgaccgacacggacggcaacgaggttctgtcgctcgctgccggcttcggcaggggcttcgctacgtccgagattgacctgctctgcttcatgcgccacgtgcgcctggactccgacagcgtcgagatcacccactcatacgcgggccgctgcagcagcacgatccccgtcatcgaaacgcccgagggagactgatgagctacgcaacgatagaggcctcaagggagcagggcgcgccggtagagctgtatgagttcacccaggggctgcagcggtgggccttcgcctccggggcgttcgaggtggtgcgggacggcgtggtgtacaagccgtccagcgtctcccgcgaccgggtcaagcagtcgacggacatcttcaagaacggcatcaaggtcaagttcccgcgggacgacgagttcgccagccagttcctcgggttctcccccgaggaggtgacctccctcaccatctaccgcggccactacggcgacccggaccagcagttcgtgatctactggaaggggcgcgtgctcagcgcctctgccgccgactccgccatcgacctcgagtgcgagccggtctacacctctatccgccgcccggggctgcgcgccaagttcgagtacggctgccgccacgtactgtacggccggggctgcaacgtcaaccgggagagctaccggcacaacggcacggttatcggtatgagccagggcctcaacgtcgtggtttcgggcgtcgagggcaactacgaggacgggtggttcgccggcggcatcctggtggcgcccgacggcgcggcccgcttcatcgtgagccacaccggcggcacggtcgtgctgtccaggccgctggccagcctcgcgggcgaccaggcggtcaggctgtacccgggctgcaaccacctgaagacgacgtgcgccgccaagttcaacaacctgcccaacttcggcggcttcccgtggatccccacgcgcaacccgttcgacggaagctccatcgtctgagaggttactagcatgatttggtggtatatcgtagtcttcatcgtggccctcgtcgcgtcctacgcgatgatgcccaagccgcagaacgccaagccggcaggcctcggggacatcaccgcgccgacggccgaggtcgggcgggccatcccggtgctgttcggcacgcgggacctgaagggtcccaatgtgtgctggtacggggacttccggaccgaggccatcaaggccaagggcggcaagaagtgacggacgaccgcgccgtggtgcggatggaacacatgcgccggctgggctactgctccgccggcgttcgctcattcttccagcgccacgggctggactacagcgccttcctccgggacggcatcgacgcagacaagctggcggagaccggggacggcatggccctggccgtcgtagaggagtccaaaaatgggcggcggtaagaagcagaccatcgggtacaagtacttcctgggcatgcacatggtcctgtgccacgggccggtcgacaagctgaccgagatccgggtggacgacaagctggcctggaagggcagctcgaccggcggccagatcatggtctgcgccccgaacctgttcggcggcaaggagcgggagggcggcatcggcggcttcatgctggactacctcaacaagtcctacggcgaccgcatcgacccgccgctggacccgtccaccacgccgatcgcggccagcgccggtacggtcgacgtcatgatgggcaaggacgaccaggtcgccaacacctacctggccggccagctcggcggcgcaataccggccttccgccgggtactgggcgtggtgctccgccgcgtctacctgggcaacaacccgtacctcaagctctgggccttcagggctacccgcgtgcacacccggcagaacggcctggcccagtggtacgacgccaaggccgagatcggcgacggcgacatgaacccggcccacatcgtccgcgaggtgctgaccgacccggactggggcatgggctaccccgagggcgacatggacgagaccgcgttccgcctggccgccgaccagctgcactcggagtccatgggcatgtccctgctctgggacacccagcaggacctgagcgacttcctggcgatcgtgctccgccacatcgacggctcgctgtacaccgaccggtcgaccggccgcttcgtgctcaagctggcccgcggcgggtacgacgagagcaccctgatggtgctggacgaggagaacgtgatccgcgtctccgacttcaagcgccgcacggttgacgagctgaccaaccaggtcagcgtggcgtactgggagaagtcgaccggcaaggacggctccatcaccgtgcaggacatcgccctagccgccaaccagggcagcacggtcggcacgaccatccagtacccaggcttcaccaacggctcgatcgcgaccgtggccgccgcccgcgacctgaaggccctgtccaccccgctggccaccgccaccctgtacgcgacccgcgccgcggcgtccctgaacatcggcgacgtgttccgcttctcctgggcggagtacggcgtggagaacatcgttttccgggtgaccaacatcgagctgggcgagctgcagagcaaccagatcaagctctccgtcgtcgaggacgtgttctcgctcacctcggcgtcctacgccccgccgccgccctccgagtggcagcccccgagcggcgaggccctgccgtcgccctaccgcctggcgatggacaccccgtactacctgctcgtccgggagatcggcgacgcccaggcccagcagctgccgaagacggccggctacgccctggccgcgggcgtctcgcccggcgggacctcgatgaacatggcgatgtacgttagcgccggcgcgggctacgccgaccagacggacctgagcttctgccccaccgccgtcatcagcgccgcctacgacgacagccccgagaccaccgtcatggccctgggtgcgacgaccgactggaccatcgtcgaggcgggcgacctggcggtcatcggctacggcccctcgaacgccaaggagatcgtccagatcgtctccttcaccgacacgcaggtcacggtccggcgcggcgtgctggactccctgccgctcccggtcgcgtccggcgcccgcctgatcgtgctgggccagggcggcgagcacaccggcatggactcgaccgagtacgccagcggcgagcaggtgtccgtcaagctgctgacgaacgcggcccggggccagctcgccctggagtcggccccgaccgacgtcaccccgatcctggcgcggcaggcgaggccctacccgccgggcctggtgcgcgtcgacggcgccaggaagcccgcgaccgcggccggcccggtgtccgtcacctgggcgcaccgagaccgcacgcagcagaccggcgacgtcctgccgacccaggacgccgcctcgatcggcccggagaccgggacgaggtacgggatgaggttcctggacgctggcggcgcggtgctggtcgctcgcgataacatcagcggcacctcggcgaccggcaacctggcgtacaccggcaacgtcacgatggagctgtactcgatcaccgacgcgggcgagagcatcaaccgccaccgccgcaccttcgcctacacggcggccgtaggtacgaccgagagcaccatcacggcgggcacctggacccccgacgaggtcatctttgacggaggcggagcctgatggcaaccatcgtagtaccccagcgatttgcccagcgccgtgacacgtcggcgaactggaacagcaaggacccggtcctctggaacggcgagatcggcttcctgctggaccctggccaggccgtcaagctgaaggtcggcgacggcaccaagaagtggagcgagctcgacttcttcgcctccgacggcaagccggtgcagctgcgggcggccgacgggtacatccagtggaactacgtcggggacacgtcctggatcaacctggtctccctggacaacctgcgcggcgcggacggcgacgacggggccgacggcaagagcgcctacgagatcgccgtcgacggcggcttcgtcggcacgatcccggactggctggcctcgctgaagggcgagcccggcgacaagggtgacaagggcgaccccggcaaccccggcacgccgtacgcccgccgcatccagcacgtggccgacaccgacgcaggcaccttcgagtgcgactggggccagtacgacgagatccggatctccctcacggccacggtggtgttgagcttcaccggggccatcgacggccagggctgcgtcttgaagctgcgccagccgccggcgggagggtgccaggtcgggctgccctccggcgtggtccggttcaactccctgatccaggcgtacgccgttacccagaccgggtcgcgcgcggacaaggttggtttcgtctacgacggtgaagacgcacgatacgacctggtctccatcgttcccgggatatagcccatggacgagtaccagccgccccaggcactgagcgtgccgttcctgttcgacggcacgtacgatccgccccaggccctgaccctgggcttcgtatttggcacggacggcggcgggggcacgacggacccgctcccgtcgaacttcatgatcctactaaccatctgaggaaaccccatgaccgtccgagtgtactccagctccgacccgagcgcgcccgtgctgaccggctcgaacgccggcgatctgctcaacctgctcaccaagtgcctggtcgacggctacggctccaaggccggcgccggctggaccaagcccttcaccgccaccaaccgtgcggccttcaagaccggcgcgggcagccgcggccggtacctgtacgtggacgacacccgaggctcgtcgacgtacgccgcccgcgtgtacggcatggacaccatgaccggcatcgatgcgggcgacggtcgctggcccaccaacgacctgatcccgggcggtctgtactggcacgtgcactacaccggcagcacctcggccggccggccgtgggtgctcgtcgcgaacgagaagatgatgtacctgtacctccagaactacccggacgccggctcgagcaacacccagtaccgggagttctactggttcggggactacgacgcgtactcccctgccaacactttcaacacctgcatccagggcaaggccagcagcagcccgaccacctccgaacaggagcccttcgtctcgtacaacgtcagctcgggtgcgcccggcctctacgccgtgaggtcctacaccggcctgggcggccccgtgcagctcggccgccgccacgactactcgctgtccggctccggcaactggggaggcaacggtagcctcagctacccgcacggccccgacggcgccctgatgatgtccccggtctggatccacgagccgggcggcacgaacatggcggccctgctcggcaagatgcccgggctgtgggccccgctgcagtacgtgctgaacaccggcgacaccttccagggcgagggcgacctggccggcaagaccttcctggcgttccgccagtacgagggtcgcgccgtcatcgagacctcggacacctggagctgaccgtggccgacctgggcgcaattggcgcttcgtacgggctggggtcgctccgcgggcccaacccctcggcctacagcagctacgcccgaccctcggcgcggcagacggccgtgccgtcacctcggcccctcatggggcggggcttcgtgcgctacagggtgccgacggccgtgccgggcaccccgtcctgggccggaggtccgaggcccgtcggcgccgagccggccgcggtgtacgcggtcggcggcacggtgaagcagaggctaaacggcgtggactcgccgctggcgaactgcctggtgcgcctgtacgccaggcggaccggcatgcccgccggcgcggccctgaccggcctggacggatccttcagggtcggcaacctgctgcccgagaccgccgggttcttcgcgatcgccttcgaccccgacggtgccccggtccagaacgccctgatcttcgacaggctgcaggccctgccgagcgtgccgggccgcatccgcaattccgcgccgagcttcaccgtcgacgtggcggtgtcctcgcagctcaccacggcgtacctggtcggcgccccggcgttctcggtcagctccggggccctgcccgacggagtcgccctcagctcctcgggcctgctgtctggcaccccgacgaccgatggcgaggcctactcgttcaccatcaccgccaccggctccatctacggcacggcctcggtgacctggtctggcgaggtcgccggcggtatcggctacctgaacacgctcaacggccgtaccggcctgaacaacgtctggtccggccaggtggacgacagcaacaccgtgctgccggcgctgccgttccagttcccgctgttcggcctgacgttccagaacaacatctacatcagctccaacagccacgtggacttcggcttcgggtcgagcgcgtactctgggctgtcgcccaccaacccgggacgggcgctgctcatcaacgcggccgaccggtcctaccagaacgtcttcgccgggcccgtgctgtctggcgcctgcttcctgatccgatacgagggctcctccaacactggcaacagcaacgacaatctgtgggaggtcggcctctacaacgacggcagcatcacggtcgtcaccggcacggtgccaggcagctcgtcgccgaacggcgcgggcacgtccaacatctcggacggcaccgcctggcgcagcgtcacgccgcccaccttcctcagcaacagggcctacctcggtcagccgaccgggcctgggggcgacttcgtatggacggagattacgccgtgaccgaccgcaacgagaactggaagtcgagctggagggtgcggcggcgcttcatgttcgccgtgtcggccttctgcatgtgggtcatcgggtacgtgctgtacaagaacctggcctccgggccggcggacacggcaatcacgatggcgttcctgacgctcatcagcatcgtcgggtcctacgtgttcggcgccacctgggaggacgtctccctggcccgagccaagctgaagaccccggcagggaatgccggcaagcccgccccggcaccaggggcatcgcagagaatggaggacataccatgagcttcgcactgggtaccaagtcgcgcgccagcctgaggggcgtgcacccccacctcgtcaaggtggtggagcgcgcaatccagctgaccggcgtggacttccaggtctacgagggcctgcgcaccagggagcgccaggcgaccctggtggcgcgcggcgccagccagaccatggactcgcggcacctgcccggccgggacggcctcggccacgcggtcgacctcgtgccgctgatcgacttcgacggggacggcaaggctgagctgcggtgggactggtccctctgctacaaggtcgccatggcggtacgccaggccagcctcgagctgaacgtgcccatccgctggggcggggtctgggaccgcgcgctggccgacctggccgaccccgaggacgaggtcgccgagtacgtgggccgccgcaaggctatgggaaagaaggcgttcctggacgggcctcacttcgagctgcccgccaacatctacccctaggagggtgacatgattccgttgggatacaagctcggcgctggcgcgcttatcggggttgctttggtcacgaccatcgtgctatcataccgccattacgacggcctggtcgaggacaaggccgagctcagcgcccaggttgcagctctcgagcagggcaaggcggcggagaaggccagggcggacgccctggaactcgccatagacaagtgggatgatgccgccaagatccaggcggagtcgctcgaacgattctccactgtccagcgtgaggctggcgaaaccacgaggaagctgacggatgtcctgtcaaagcacgacctcggcgcgctcgccagggcgaagccgggtctcatacagtctcgcatcaatgctggcactgctgatgctttccgcctgctcgagcaatccacccagggtggacccgccggcggagcccaagcagcccccgctgcccgtcctgccaaagccccagcccgtacggactgagtccgtacagtggcggctggtccaggtcgacggcgagaccctcttcgccgtaacggcccgggggtacgagtcgctctcccgcaacctggcggagacgatccgctgggccaaggaggcctcctggcagctcgacttctgccgcgacagccgccagaccgacaagccccagggggaatccaagtgaccgcacagacgcccggcccggagcagcagctccacaatctcaccccagacgaggccagggcgctcattcgtgaggctgtgcgggagacgttcctcatgctcggcctgaaggtcgacgaccccatcgaggtgcagaaggacttccagcacctgcgcgagtggcgcagcaccaccgagaccctgaagcgcaagaccctgctgaccatgctcggcatcgtcgtgtcgggcatggtgggcgcccttgtgatgggcgtcaaggagatcttcagcaagtgagccccgcggcgggtgcctggcttcctccttctccaggcatccccttccaccgcctccgggcggtggctttttctggatctcagacagtcaggccgccttcgggcggcctgactcgtcctaggccccgggcctaggccgccttggatgccagggccggcctggaatgcccggaaggcacgccgtggcagcctcgggcgagcacgaccgagccgacgaccacggcccagaacaccacgctcagcccgaccgccagggttatgcccctcgcggcccgcagcccgtcgtcatttccctcatccagctcgcacatacgatgatgcctcccagggacagttcctggaaggcatcatggcgtgaccccggcgcggtcgacgccgtcagtagacccacacgcgctggtactgctcgggcatgtgctcgcagctccactcagacttccggccctcgtactcggccttggggtcctcgacctggacgcactccttcgagtgccaggagacgtgcacgatcgggcggtcgagcgcctgcgcgaacgtcctgatgaggaggacgcccatgacgaggacggcgaggacgcagagggcttgggtgaggtagtggcgtggcatgtgggtctctccttgaaccgtggccgttactggcggcttgccggtgcggggtgggtgggctggggtgtttcggcgggcggctcgccggcggtgatgcggatctcgccagacacgtagtcctgctcgatcccgatgaacttgccgccaatctgctcgagctcctcgcgggtcacggtcaggccgccaggcgtgcgggaagccacgacgccgagcagcgcggtaacccgctgcagctgaatctcgtgcgggcagacgtcgcccgacatgaggcgggccagcagttccatcgcgtcgttacggttgctgctcatactgtttggtctcccagtttatctctacggaagtggtgcccttggcgcggcacttcgccacggcgggcagcttgaggtcgaggaccttcgccacggcgggcgcgtcctgcctcgggatgtatcccagcatctgcccgcaggcgtcgtacacggccacggcgttgcggtcgtactggttgtgcggctcccgcctgagggtgaggacctcgtcggtcctcaggtcggcgatcgcctcgcgggctcccttgtggtgcacggagcccacgatgtacgttctcatctgtgacattagccctccttcttgggctgggcgcgcgggcggttcggcaccttctcgccgcgctcgcgcatgtggacggcataccagcggaggcatgccacggaggtcttggcgccgtcgaactgctcgcggatcttgtcgaggatggtctcgtaggagtgaccgtaggggcggccgtcctcgtccttgctgatgacctcgagcagcaggccctcagccacgacgcggatcacggggcccttttccttcttctccttcgcggccttctccttcttcggcttggtgggcttggcgggcttggaggtcatctgcgccagcagcatgttcagaccgttgggctcctccttcgccttctcgatcttctccgacagctcgggggtgggggtgccggcgagctcgacgatggcggcctcagtcttgtcagcctccatggaggcgatctgctcgagcagcttggccttgccgcgcttcgcgaggctcttggggtcggcgcccttgccgctcagctcgttgtggcgggcggcgatgtctgcgatgttggattcgttggacaggttcatggtgatctccttggacgggtcggttggatcgaggacgcagtgcgtgccgtcgatgggttccattatggcgggttgtgggcgcgatagtcccaacacttgggctaccgcgcttgaatgatggggttactgtgcggcttcaacagtcttgaggacctgtcggaactgtgcaacggtcatgccattgatgacggtggcggtggggttcttctgacggacgagctcttcgctggcacccttgatggtgtacagcttggagtccttcatgatgcagaccttgcccttcgtgaggcggtcgtactccctcttcgcgaggatgtcagccgccatcgaacgcagctccacaatgtcgagcagcttgtaggcgtcgatgcgggagaactcgaagtggggagacgcctcgtcgtccatgtcgatgacggtgcagtaggccttgccgtcgacgtacaccttggcggtgaagccctgacgccactccttcacgaggtactcgacggacttgagctccaccttgaccttgcgggcttccgtgggggccgccaaggccttggcggcgggcgacttcttcatcttcgagcggtagtaggacacgcaggcggcggaggtgctgccttccgggaaggccttcttgacctcggcgagcaccgccgcgttatcgaggcccgccgagatgcccgcgcggatcacgtcagcgatggtcttcggcttcgcgatggcgaccgtggccgcaggtgcctcctcagtgggaggcacgtagtccgccgtggtctcgatcacgcggtcgaagatctccacgtggccctcctgaccgtagacgccgcgccaagtgcggccgttgtaggagacgtagccgtagtaggtgcggctgccctccttatagaggaagccgtcggacttcttgaggtcggacgcgccgaagtcgttggcatcaatccatgcggtgaacagcttggatgcgtcggcgagggttgccgccgggtggcgcttaccgccaaacttgacctcgaacatatcgtgcctcacgtgtttgcgttggtgtgaggtcattatatggggtcttttcccaaatgggagccccctccagcaaattattttgctaaagtttcgcgaaggccagtttggcgccgtacatataaaagagaagggcccccggacgtctccggaggcccctcaggtcccctgacactggttgtccccggccgtggctcagtgcacggtgggcttgctggtggtgcggccgtccttgacgttcacgtcctcgccgtcacggcggaggcgggaagcgtaccactggacggtcttgacggaggtgttcgcctccgggtggcgggccttgatgatgtccaccatcgccgggtaggtgagggcgcgcttgcggcggcccaggacgcggacctcctccttgatggtgcgggcggtgttcggcatgactgattctccttcgttctagtgtgcggtccgggtcgtcgcccggttgtcgcatgccccagtggtggagcacggagtcagtatgcgcttacgttccgagccaaaacaccatcgttccagctaggcgagcatgctgcgattgcccaatgagtttgtcgcaaactccagcacctcctggggcgtgtggtccgggcggagcaccgacatggcggccagctcctcctcggtcaccccgtcggccacctcctgggccttgaacccgggcaccaggtagcggcgcacgtcggtgcccttgcccacccgggcgtagatccagcagttgccgccgcaccgccacctctttctgtgccacacgacctgggcctgcctgacctcgaagccgagcttgccgccccgcttgggccggtcgcagcccttcagctcgagctcgaagtacaggccgttccagcacccgtccacgtccgggtcgcccgagctcaccaggttctcgacccgccgcatgtgcaggccggcggtgcccttcagccggtcccgcagccactcccagagccttacctcccgggccacttcatgtcctcggtgaagacgcgcaccttgacgtcccctatggagatctgcaccggcgtgtcgccgttgttgggcaggaactcggccagctcgccggcgtgcatgccgccgccgagctccgttggcacgacggtgatgaacgcccgggtcacgtagcccagcctgagcgcggcgagcgccagggtcgggccgccgatgagccatgcgtccgggtggtccagctgggcctgccccagggacttgccaaggccgaggttctcggcgtcgggcgcgcgggtgatgcgaaccatggagcggttcggcaggcggggcatctggtcgaaggtcgtcgacccggcgagcaggacgtcgttggcgttcgacatggtgagcaggcggaagatggccttgtccgtcttgcctgtccagcgcatgtcgtcgtcggcaccgctggccaggtagccgtcgatggatgaagctagcagcagtcgcattggttgtactcctctaggtaggtgatgtggatcccggcgagggtgagcaccgcgatcgacgtggcccaggacttgccccaccgatggtggccgaggtcgggcctcggtgccaccaggcggcggatgcccgcctccctcagcttgcaggcgcacgggaggcaggggaacgaggtcacgtagacggtgcagcccgccgtggggaacggtgcctgccggaggcagttgtcctcggcatggaccatgttggccagcttgaaggcgcggtcggccaggagcgacggcaggtcgggcacgtccggcgggaagccgttgtaccccggggagacctgccgccggtcgggcgtcacgaggacggcgccgaccttgcggtccgggtccttcgacatggccgcggccagtacggccatgcggtagaagaacccatcccactgttcctgggatcgcttggtcggcacctccatcactcaatgacctcgggcttcgggttgtacgcgggccactggtgctgcttcgcctcctcggcgtagcggaccacgtagtcgtcggggtgctgctcgacctggctcagcgtccagcccggcagcgggagctgcggcaccacgggctcgtgctggagcatctccgccgccatctgccagtgcgactcgtacaggtgggcgtgggccagcgtcacgtgcatcacgcccggccggatgcgcagctcgtgggcgacggcgtccatcaggagcgcgtggcccatgacgtcgtacggcaggccgacgaacaggtccgagctgcggaggaacaggctggagtgcagctcacccccggtgatgctgaaggtgaagctcgtcgggcaggggacgttcttctgcccctgggcgcccaggccgtcctcagccgggtcccaggcggacacgtagcacctgcggtccgtcgggtccttgcgcagcgcctcgaccgcgagccgcagctggtcccggccgaagtggcgacgccagcggtagccgtaagcagagcgaacccccgggaatgcgacacccgacttagcctcagtgccggcaggagtctgcgggtagatcggctcgacaaacttgtcccacaacggcgcgtacctggtgatgaaggcggcgtcctgctcgccccgcacgtaccaggcgacctccgccgcggcggaccgcgggaaggtcttgcggtagccgacggtcggcaggaggccgtcgctcaggtcgacgcggaacgccgtgcctccccggccgacgtggacgcgcgttccggtgcgctcgttcgcctcgatcgggctgctgaaggcccaggcgatcagtgcaccgtagacgtcgtagaacggcatgaggacgccgctcacttcgcgcccccgaggccctgctgcttcagccactcggcgtagtaggtgccgtagttcaccaggtcgcgggcggtgtcgtacaggccctcgtagttgggctcgcggccctggcgcatagccgtgatgagcgactggatgcgcaggttcttggtgtggagcatgtgtgcgtaggactcgtggccgaacgggaagtaggcctcgcgcccgcccgggacgttgttgtagtcctggcccttggtctcccgcaggtgctgcagctccagccacaccgggctgatggcctcgcggccctgggcctgctggcgcagctcctggagctccgccacgtcggacaggtcgaaggtgagcagccagtcgtggttgggcggctgccagccctcgggcttgacggcgtcgcggccgttccagccggggcgcttggacaggtcgccgcgcaccttcgccatgttggcggcctgcaccgcgtcgaacacggccagcggtggcacgcccatctcgacgaggcggcccagggcgaagtagatcaggtccaccagggcgtcggcggcctcgagcacgtcgccgtcagcgtgggcgtccttgaactcctggatctcctcgttcagggcgtcgaccgaggcgtccatgcggatgctggacaggatctccggggtgcccgggatgggcgtgtccaggatctggacgttgaactgctccgctttcaggagcatgcggctcaccagtgctgctaccagggcctggtgcgggccggtcgtgtcgatctcatccatcttgctgcttcctcagttgttgaaggtaccacgtgagcttgccgtccgtcgggtcgacgtcggtcctgccgtctacgaaaatcgcccagctgtcggcggcgtacttgccgcagccaggcagggactcaatcttgacgcttcgggggtccacctcgagccaccgagctgcgagcctggtgagagtgacggcccggcggcgccacagccccaggggccggagcgcgtcgtgcaggtcgtcgggctctgcccgggacagcgcctccgggctcgggtagtccgccatcaggcggtcgagcgcgggccgggcctgccgccaggtcgtcaggttgaccaggctgcaggcgaccagcatccagaacggcgtctccctcagccgctcctggaacagctcgcccgcttcgggctcgtcgccctcccaggcctcgaccctcaggaggcggccgtggcggcgcaccctccagcgcacctcgttcatcgggccgcagcctccctgatgccccgccgggcggcgcagaccagggcgtccaggaactggcccgaggggctgccggccagcgtcacctggcaggacgcgccgccgcgggtgacgcggacgatgaggtggtcaccccggctgaaccgtacgggctccacctggaacccgtcgcgctcgagggccgccaccccctccttgtgcgggcggagctggacgcggatgcccatgctcaggcctccgccgtcttcttggcgcgcggctgcttgggggcaaagcactggtggccctcgggcaccaggaggcgggcctgctggctgtcctcgctcagctcgtagcccagcccgttctccttgttgatggtgaacaggtgggacagcacggcggagcggtccaggtccagctgcgccatggcgtccgcgatagggaagaagcccgagacgaagagccgggccaccgtggcgcgcttgccgggctcggggatcggccggagcgcgtcctggttgatcggcttgccgctcgtccgcttcttgggctcgtagaccgtgccgtcctcgttgaggcgctgcggcttctccggcttgggctccttgaccggctcgacgtatgcgaacaggtcgaagccctcgggcaccagcaggcgggcgcagtcgtttaccagctcgtagcctacgccgtggtcgcggttgagggtgaacaggtgggagagcaccccggagcgggacagcccgaggcgggccatcgcctcatgaagcgactggggctcgtcgtgcaggaagaaggcggcgacctggccgcgcttgctctcggggcggcacgggcggagggagtcctcgacgatcggcttgccgccgcgcttggagtcgtcggacttgcacgggtcgggcggcgggggcaggaacttgggcaccgggaaccccatctcggtgagcaccatggcggccacgccgtagtccttctggaatcccagcttgacgcaggtctcccaggccttctcgatgtggtgcgcgatcttggacggctcgacgtcgaagcgctccgccgtctggagctcgccgcactggttgctgacctggaaggcctccagggagtgggggcagaggatggtggaccgcttctcgcccttaatcaccacgacgtgggcgaagccgctggtcggcgggtcggtgatctcgtaccggcgcttccagaagttgggtgcgccgccccgcacgaagtagaccttggcgaagacgatgttggctggcagcatggtggacgtccatatagagaaagggacctggtctgcaccaggtccctctatcttatggcaggggccgcgccccttaaaccatcatttccaggcgaactgcccggccgcttcggtgattactcgaagatgcccttgtcgccggcggactcgccgcgctgggcgtccgcttccttctgggccttggcttcggccttggccttgtcggcggcttccttcttggcctgcttctcggcgtccttggcggccttcttctcggccttggccttctcggcggcttccttcttggcctgcttctcggcgtccttcttggccttggcctcggccttggcgtcgcccttcagctcgcgggcggtcggcaccttctcgccgtccgagcgcagcttgttgcggtaccagttgatgctggccatggaggtcttggcttccgggaactgctcgcggatggcagccagcacttcttcgttggtcttgccgtcgcggatcaggcccttggcgatctcgccgacgcccggggccttcggagcctggtccttggtctcggtcgcttcgccggaggtctgggtgctggtgtcttcgctcatctgcatctctccttcagagataggtgttaggattggactgtcgccgcccgttcgggcggcttgcccggcgtgcgtcagtgggtgtagtttaacgccgggctaattgtcgtggagccgtcgttcgcacgtccggccgggagtatcacagctgctgtctgaacagagccagcagtcggtcgcgcaggcctcttccggctagctcctcggagatggagcgcttcgactccaggttggcgaggatgtactcgtccaccgaggccggcgtgacgtagtccctgatggtgacggtcttgccgccgatctgggtggcccgctcgttggcctggtcccgctcgatgaggtcgaacgtgtgcgagtaccagaggatgacgtccgccgccgagaggtccaggcccgcgccgccggccttgggctggccgacgaagaccttcacccgagggtcgttgttgaacaggtcgatggcctcctggcgcttcgcctgggagtgcacgttcccgtggtactcgacgcaggcgatgccggccttctccagggtgcgcaccacccggcggatgtcctcccggaacttgcaccacacgatgcacttccggtccgactcgcgcacgtcctccagcatgccctgcagcctcgggttctcctcgtcggagaccaggtcgcgcacgttgccctcggagtcgatgacccagccgctgatgagctgctggagcttgatgatccgcgcgccgccctcgaccgcctccacctcgccgccgtcctcgagctccaggatcatctccttcaggagcttcttgtactgggcctgcatgtcctcggacaggagcaccgtcctcgggtccatgagcaggtctggcatgtcgtcgacgtcctcccggagcacgacggaggcccacctggacatcctggcctgcaggtcgtcgaggttcctgtagtggtccaggcggtcgtaggacctgccgcccttggtcttctcctgcacgtagtaggcgtactggctctcgaactccccgaaggtggcgaagcccagggcgtggtcctcgagcagctcgaactggctgtacgcggccagcgggctgttggacaccgaggtgcccgtcagggtgcgccgcaccctgcagtagcgcttgagcgcccgtgcccgcttggtgcgcttcgagccgggggaccggaagtcgtgggactcgtcgaccaccagcatgcaccggcccttgtgcttctgcaggaacttcttgatgagcgcggccggcttgtcgtggatgatggactcggagttgacggcgagcaccgacaggccggactgggcccgcaggacgcggtccagggacgccgcgtggccgggcttgctcgcctcgctggcctgccaggcgtgggcgacgtactcgacgccctcccacatgtggatcggcagctggcggcgcacccagttgacgtgcacgccgttcggggcgagcaccaggatgccggtgatgtcccccttctcgtaccggtagcaggccaggtcgagcaccgacttggtcttgcccgtgcgcatctgccacagcagggcccgggcgtcgtcgtcccggtggcggtcccactcgtcctgctggtgcttgtagttgggcagcctgaatcggggcgtcactctatcgtctccttgcgtggcttgaactcttcgcccaccagctcccaccggtccatcttccagtacagcgagtcgagcagcatggcgatcttccagccgcgggcccacctgagcgccggcgtggtccacaccacccgctcgtcgcaggtgatgacagtagacgccgacttgtacggggccttctggtccggcttccagtagatcttgtatctcacttgcggtacctcattccggtccagccctccgctttcaccgggcacccgtcggcccacggcatggtgtaggccatcgtggcctcgaagtccttgacgtcgccctggtccatgtcgcactccgcgatcagttcgtcgtgcaccgacaggatgacgctgtacaggccctcctcgtggcaccttagcatggcgtccgccatcaggtcccgcgcggtcgcctgggtgatgttctcgacaagcatgccgccgtaggtgtcctggcgacgccacttcttggtgtacgggtccacgcccatgtaggtgagggcgggcttcttctcgccccagggcgtgggcttcatgacgacccgcgggtcgcagtagcccagcagcctgccggacggcagcttgcagtgcaggaagccgtcgaagcagcaccactgcaccttgccgcacttcacgacgcggcccggggtccggacggcggcgatcgccgcggcctcctggtcccaccacatcttcttgacccgccagaacttggcgcggtaggcgtcgacgatcttctgggcgaactccagctcgatgaagatgccgtacttctccgccagggtgttccggaacttgttggcccccatctggtagcccaggcccaggaccgcctgcttgcccatctggcgctcttcggcctgcgcctccttgtcgtggatcaggcggccgtagatctcggtcgccatcgccatgtagatgcactcgttccgccggaacacgtccagggcctcgtcgtcgcccgccagccagagcacgacgcgcgcctcgatggcggcgtagtcggccaccatcagcctcttgccctcggacggcacgatcatcccgcgcagggcgtgggacagcagctccatggcgtccccgtagagcatctccatcatcgccaggtcgcgcgacttgatgacctcccaggcgagcgccatgttcttgatgttgccgcgggggaagttgtgcggctgcaggcccgcgccggaccaccggcccgtgcccgcgccgtggtagagcaggcccccgtggaccttccaggtctccgggtcggcccagttctgcgccgcaatgaacttggcggtgctcgaccgcccgagggccctgacgagctccagggcgcgcctgaccctcggctccaggtcctcccgcttgagccacgagtcgatggtgccgccctgggtgttctcgatcggcagcccgttgtcgttgaaccactcgatcatgcgggcgcgctgcgtcgccttctggacccggccgtcggtgatctcgaccagctcggcgttcagctccgtgtagatgccgtcgacgatctccagcgccgcctcgatgccctcccggtcgagctggaacccgcgctggttgatcgcctggtccatgaggtacatctgcgtctcgcgcggggacaggtcgcgcaggcggtccgacacggcctcctcggcgaggacgtccacgcggcagtaggcgcacaggcgctccagcagctcggcgctctcgacccagaacaggggcaggcggaagacctcctcctcgacgtccggggtcggggagtgggcgacggccgtgtaggtcccgtcgtcgttcgcgaacaggtcgatcttgtacttcttggcgggcagcggcagggtgccctcgtcgtcgatccaggcgaccacgtcccgcttgagcggcttgcgcggcttcgccatcttcttcatgatcttggcgccctcggtgtccttctccaccttcagggccagggctggcgccagcagctccagcttgcgcggaagggagtacgccgccgccttggcggccgagcacctccactgctcgtggccgaccgcgggccagcccatgcgcgggacgcagacgttggtccagatgccccgctcgaaccaggcgttgtgggcctccaccaggcggccctccctgatccactcgaacagctcggcgagctcggggcagtcggcctcctcgacgcccaggtgcgggaaggcggggtgccacagggccgtgcggcccttctcccagtgcggcaggcggaacgccaggcacatgacctgggtcgtggggtcgagggagtaccgccaggagccgcagtccttgatggagcacgcggagcgggtttcaaagtcgatcgtcgccttgggggcgttcgtctcgtagtggatgcccgccgtctcgtacaccgaggcggaggcgatcttgaacagggccgtcttgacggccgcggctacctgggagcgctccggcaggtcagagacctgcgctggctctttgttcggggcgattaccatggatcctccgggctagccgcttactgtatcagggcggctcattgaagtccgccatcatctcccagtgtttgaatacctcgccggcgcggatgcactcatccctggtcaggttgcctatgtggaactcctcaccctccggcatgcccatcatcctggacagcatcttgtaggtcttgaagcgggacatgtgcccgtccttccagagcgggtctatcatggcgtgcagggcggacctcagcgccctggtctctctgtccgccaaggtgccgatggggtagaccgagtgcgggtgcaccccgcagtaggccccgcaggacatacacaggtagatccagggccactgcccgacaggctgcttgtagactacctcgttgcccgtcaggacgaccaggcgctcgccgcagctgtcgcatgcctcgggcgggtcgcgccagtgcttgaaccgcttcctgcggtggtatgccgagaacttcaccagtccacctcctcctgcacgatggcgcgcacgtatgcgtcgaccacggggtccgggtcggccgtggcgcccttggcgaccgccagggccgccttctcaagccggccgacgtcgatcgcacctatgcgggcctcgcgcaccagggcgttcttggtggcgtacagcggcttcagggccgtgagctgaacgcgcgacagctccgtccaccgccgaccgatcgaccggaccacctgggacagcctgacggtcctctcccccggcacgatgcccgtgtcgtcgacggccttgccggcgaagtccgccacggccgccaggtccctgaggggccaggcggcgagcgcgcacagggggcacggcagggagtgctggtggtcgtcgcacttcaagggcgcacctcgtaggcggggtccttgatgagctcgtgggggtagtagaagacgcagctggaggccccgtcgcgcttgacccacacccggccgtcgggcgcgtggaactccaccgccccgcgggcgcccttgtggaagccggcgtgcggcgccacgatgatccgctggccgaccccgaagtgctccggctcgtcggggtccatctgggtggggatcggctcgaccaggagcctgccgccggccttcacgacgcggaagggctggctctcggggatggtcagcagcttcgagccgaagccgccggtcaggatgtaccacagtacggtcttcagccagctcatgcgatgtgctccagtgcggcctgctgctcttccataggccggtgcagggtgaagccggcggccgcgcgggcgcctgcgtggaatgccccgccgtcaagctccttcttcttgaacgcgtcctgctggacgacgccgtgctcgtagatcctgtcgcagtgccgctggatggcgcggtcctcggcctccgtcggggcgatggcggagatctggctgtacacggagttgagccagccgatgtggaaggcctggcgcttgccgccgtcgcccttcatgtcgggccggcgggtcagcaggtcgtcccacgaggcctgcatcgcccgccacaccaccttgtgggcgtactcggccagcatgacgcggcccttggggccgatgtagcggacgttcaggcgggcggcggagccggggttccgctcgaagacggccttgacgccgaaggcgcgctccatcatggtggccaggttgctcatggtgcgacacttgccgaagccctcgcgagtcttgacgaccacgtcggccgtgtccaggccgtccagctcgtcctcggtgatgcccagctcggacatgatcttctgcgcctgccggagcgccgcggccgcctcgtgcggctccgggctcttcgagagggccatgcacttcttcagcttctcggtgagccgcttcctacgttctgcgtccatcttcactcctcctctttggtgaggcccagctctttggctgacgcccagattgagttgccgagctgcggggaccgcgatcccctgacctcggagcggtcgtcgccgtcgtacagcgcccagccgcggtcgtccttgaggaactggtagttagcctcctcaatgaggtccatcatgcgcttcgtggggctcacttgaaccccagcaattcagcgccccgctggagcagcgacttgcgctctgccgccagcctggcgcgggcccgctccagggcctcgcgctggccgggcacgggcgccaggacgcgggcggcttcttcacgccagcgctggtcttcgttgcgctggtccaccagggccaggttggcctgccagtctttgctcacggtctgtgctccgaaacagtgtggggctatcatgccggggctttccgccctgggacgccatcaaacgggcaaaaagaaggggacccgaaggtcccctcctggggcttacctgcctcgtcggcggtactgaccggggcggtcaggctggacccgtcagtccaggaagctgccgccgcccgaggactgctcgccctcgccgacgaagtcgtcgacggagtcgaagtcgttctcggcggcggtgcggccgctgaacgccgcgccgtcgcccagcttctgcacgttctgcaggccgaaggcgacgcccttgttgccggccttgtcgtagccgtaggccgtcagggtggcgcgggcgtagcagccgctgtagaagccgtcctcggacacctcgtcggtgatgaggcgattcagctgctggtcgacgcagcccggctgcatcttggtggtggcggcgacgaacaccatgccctcgtagccctccagctccgacttctcggcgccgtcgcggaaggggttgcgcaggccgtggtaccagccgttgccgtccggcttgagcttgtcgccgaacttctccttcgccgcggcgtgggccagcttcttcatggcctcgaactgggccgtcttgcgggccgccgcgtcgaacagcatggtgacgccgtacttggcctcgccggtgctgccctccatcgggggctgcggcttgaagatccaggcgaagctggcacggaacttcggggaggtgaccttgcggtcgttctgcttggctgctgccatttgatgcgctccttagtagcgatttgactgtttagcgatgtaggtggagtctgccccggtgccgggtctgtttgccgccgagacgcaacccgagagggaggcggtggacggcgacaccggggcaggcgctcattattccggggtctgcgtctcgtcgacaccaccgagcggccggtcgagctcctcgtcggtgaagcgccccgacacgacgctgaccaggccgatgccgtagtgccaggactgcgccgccgacaggttgtcgcgctgcagctcggccttgtccggctcgagccgcccggaggccacggcgcggtcgagggtgcgccgccaggcggccatggtctccgcctcggtgcgcgtcacccacttgtgcgtggccgacgccgggaggtcgtacagcggaccggtcatgccctgcaggtggtgctcgaacgtcttgccgccgatgtggacgatgaacggggtcacgccgtcgcggctgttccacaccttcagcacctcgggcgcgtccggcttctcggcgttggtctggatgtaggtcatcagacggaacgcctcggcgtgctggaagttcggctgcgacgggtcgacgttctccgtcgcctgcttgatggtcttcaccagggcgcgcaggcggaccacctcgcgggccaggtccttcttgccctgggcggcgaggcccctgaccatgccggactcctcctggatgaagtcgagcatggcggcgtggagcgcctcgcggtggaaggccttcaggtcctccttggtggggttgccggcgcgggcgcgctccaggcgctcctctagggacgggcccctgtcggcggcgcagtcctggatcagctcgcgggagcgctcgatctccctcaggtcggccttggtgagttcctgcatgggcttgtgttcgtgcatggtgttctcctggtaaaaagaaagggtggaagcacatcatgcttccaccccgatccaactagagccgttagtccgcgctctcctcgccgtcgtacgcgtcgaagtccccctcggccgcggccgtcgcgtcgaccgcctcccggggatcgtcgagcgcggccacggtgatgccgccctccggcttgaacgacacgcccgcgacgagcgccttgatgtgcgccgccggggcgcgcacgccgtcggccttcagcttggccatcagctccggcgggcggaccgcctcgatcttgctcggggacttgggcttcggctcctcgaacatcatctcgcgggggatgccctcggccgccaggacgtcgaaggccgacaccggctcgcccgtcacctcgtccaccaggtcctggcggaaggcgcggctcgacttcttgcgtaccagcttgccaaagcaggcctgaccgcctggggtctcgcgcaggcgccggagcacctcggtcttcgccgacttgatgaatatgtccagcagcgggatggcccgcatccggagcatcaggtcctcgtcgctgtcctcgggcccactttgcaccacggtatcctcggtgaagccgtccccgaactccagggcggcctgggagaaggcctcctcgcgcagcgccgggcacacggccgccgccttgcagaaggtgcaccactcgcccgccctgagcggggcgtcgggctcctcggtggctcgggccgcctcgcgcagcctggcctcgaacgcccgcagggtggccttgtcggtggaccagcgtcggaccttgccatcctggtggcgcgccctgggctggacgatgaccaggtccagggtctcgaaggcccaccggagctcgtgcgccttgcccagcgcgtagtacagctcctggtcgttgtcctccacctcgacgacgacgccctggccgtgcttgtagtcgatgacggagacgtggtcgaagggcaggtacagcgagacgtcgttggtcccgaacatcgggccccagcacaccctgccgtccatgtggaacaggtgccccagggggaactcgtcagtggcggcgtagtggatgccgctcgggctgacgtaggacgggtccttctcccaggcctcgaagtcgaagtcgaagccgatcagccagttgaggctgaactggcgctcgacctccatctcggcgtgcggccccatgcgctccatctcgtcgcgcacggtgtccaggtagacctgcaccgcgtccgccatgtcggcgtcgatcgggaagtcctcgtggcccgcgggcggcagcccgtcggccgaggcgtgcaccgggacggagacgtcggacgccgccacatccagtacggagttggcgggccggtgtaccgtggcttgctcggtcgggtcgaggcggacgtagccacccagccactcccaggcctggctgccgtcgagcaggcaggcctcgccgagcgcgtgcgcggcggtccccagccgtgcggccggggaggagttgttggggcgcccgtgctccattcgtatggagcccaggcagttcatccaccgcttcgcccccgacgcgtttcttaccgcgtggacgcttggcatgtcagttcaccagtgcgagctggatggtggggtactcgaaggtcacgccgcgcaggtcgtcgatcgagaagatcgactcggagcgcacgccgcggccgtcggggtaggagaggaaggtcacgtcctcgccgtccttgaaggactgcacggcccggtcggcctcctcgcggaggaccaggaaggcggtcggctgcggcaggcccttgaaccacaggaccagctgcgcggcgtccttcgggagcttctggttgggctgctcgctcatcagacgctcttcccgtcggccttgtcgatcagcttctgcagggcgtccggcccctgctcggccaggtcgctgacggacttggcgttcaggctggtcagcaggtccatggccgcgtcgttgccctcgatggccgcgtacttcttcagggcggcgcgggcgtcgtcgatggtgaccttcttcttgtcgtccttcggcggagcagcctcgggctcggctgccggcttggcctcctgggccggcggggcctcagcagccttcttggtctcctgcttggcctgcttctcggcggccggctgggaggtggtgcccgggtcggtcagcacggcggtgttgttgatggccgcaccgaagatggcgacctgcacgggctcgccttccacgttcgcgatcatcaccccgttgtcgttcatgtccttcagcacgtcgaggatggcctcgagcagggcgttctgcttcgcctggttggcgaggctctgctccatgaaactgttcacgtccattgcatgtgctccttgttgagcggttggtagggagtgacaatgtaccgtccggtgtccgggcgcggagccaccgtccgcgggcgacggcgccctcaacttagcagtgtgctcgcaacgggttacgacgcaccgcggccgtcgcattatgctcatcccgatgcagccccgagcaacaaccatgtctcactcgtcacacgtatcggatggccccgtgctcgacacacagctgtccgtgcgattcagcaccaaccagaggcgatacctccaggagcagctccggcagctccgcactgacccgaccctgaggcacttcaggtggagcgagtcggacctggtgcgcgccctcatcaatgaggctatgcgcgctagccgccagattgtgccgacccaggagtccgagcagtgacgtcactaaagcgaccgcgcacgggggacatgcgcgcgtacgtagagaacggcctgcagctcatcccgctgcaccggtacgacgcccaggacgccaagggccgccagcgaggcaagaccccgcgggacggcgcctggcaggccaaggagtacgactcccgcgcggtcatcgagaccgccgagcggaccggcgtcaacgtgggcgtccgcctgccctcgaccgtcatggtcctggacgtcgacccgcgcaacttccccgagggccgcgactccctggccgagctcgtcgccgacacgcacctggacctctccacggcgccccacacgatcaccggcagcggtggccaccactactggttcaccaagccggcggacgtcgacctgctcgactccctggaggactaccagggcgtggagttcaagtcccgcggccgccaggtcgtggccgccggctcggtgcacccgtgcgggcagcactacgagtgggacgacctggccccgtcgctcgacgagatgccggagatgcccgccaacctgatgcgcctctgccgccggcccaccagggcgcacggcgaggccgcgggcctcggcgagctcacccccgagatgctggcctccaccctggagcagctggacgcggaggacttctccgagcacgaccggtggcgcgacctgatgatggcctgccaccacgccaccaacggcgagggccggcaggagttcatcgagtggtccacgcaggaccccgagtaccaggacgacgcctggatcatcggccgccggtgggactcgctgcacgccctctcgggccgcggcggccggccggtcaccatcaagttcctccacaaggtggtccaggaggtgggcggcgaggtgacccgcgtcgacgcggccgacgacttcgacacgtgggaggaccccgacgagctcggccagggcgtcgacgacgaggtgctgcgcgccgagccgaagctcgagggcctggcgggcgtgctcgaggagatgaacgagacccactgcgtcgtgatggagggcggcaagttccgcatcttcacggaggagctggaccccgtcctcaagcggccgttcttccagcgctccaccaaggaggacttcgagaacctctactgcaaccagctcgtggagatgcacgacaagctggtgaccaagtcctcgctgtggatcaggtcgccgcaccgccggcagtacaagggcatcatcttcgaccccgagcagacgcacgagggctggctgaacctgtggcgcggctgggcagtgcagcccaagaagggggactggtccctgctgcagcagctggtactggagaccctgtgcgacggcgacaggacctcctacgagtacgtgatgaactggctcgcctacatggtccagcacccgtcgcaggccgccgaggtggcgctctgcttcaagggcgagaagggcaccggcaagggcaccctgggccgcgccgcctcgttcctggcgggatcgcacggcctccagatctcctcgcccgagcacctggtgggccggttcaactcgcacctgcagaactgcatctgcctgttcgccgacgaggccttctgggccggcgacaagtcgggcgaggccaagctgaagcagctggtcaccgagccgaccatcgcctacgagggcaagggccgcgacgccgtgacgggcaagaacatgatccacatcctcatggccgccaacggcgactgggtcgtgccggcgggcctcgacggcgagcgccgcttcgcggtcttccaggtgagcaacaaccgccgcggggacaaggagttcttcagccgcctcaacaggcagatgtacagggacggcggcatccaggccatgctgtacgacctgctgatgcgggacatcgacggctgggcaccgcgggacgacgtgccggccacgtcggccctcgtggaccagaaggtgatgaccatggacgacgtcgagcggtggtggtacaacaagctcctcgacggcatcctcccgaacgcccgcagcgactggcacgagggcgcggtcaccatcatcaaggagcacctccggtcggactacgcggagttcgccaaggaccagagggtgtaccgccccgccgacccggtggccttcggcatgcggctcaacaagctggtgggcggcaggctcgagaacacgcaggtcaagccggcggacgacgactacgcggtcaaggtggaccgcatgggacgcgcctccgcgtcgaagctccccagcctggaggactgccgcgccatgatggaggccaagctgggcagcaagatcgcctggcccaaggacgccctcgactgatccgggggccacggtcggccacggtcggcgggagtacgagccttctgagcctactgaacgccaggctcagacggccgtacgagccgtctgaggcttacggatcaaggacttagctccggaatctgaggcagacggaccgtacgaggctttggctcgatgttgtaccaggaaaaacgacaccgataccatgacggcaccaccaccgagatgcctagacggtccagaacctcagacagttgccgaaatctgcatcaaaatcatagttttatcttatctagatctttttaataaaggtttagattgtataagcctttaaaacagatcttcctgctaaatccactaatctaggctttttgatggacacggccgacacggtccgccctgggcaacacggccggcaaaccggcggggcaattccccgcgatcggtccgaccgtggccgagcccgggcggtggccgagacggtgggcccctcaaaagcctcacgcagaaatcgtccaggcgcggtccccggagcctcgtgcacgaggaaccggcgggtcggccccgggagaccgctggcttactgcccggcctgggcggcggtaccatcggaccattgcaccagcacagcacacggagcgcctagtgagcgtcaagaacatgaccgaggacgagcgcctcttcctcagcgagcggggcccggtctcggagctcgagctcgtcgagtgggagctcgagggcctcaacacccaggagcgcatgtccgccgagcggcgccgcctcttcctgcgggcgttcgcgctccgcggcatcgtcctggacggctgccgcgcggccggcgtgtcccgcggcgccgtggagcactggagggagacctccgagtggttcaacacgatgttcgagatcgcccgcgaggaggcggccgaccgcatcgaggccgaggcgttccgccgcgcggtcgacgggtacgacgagccggtcatctaccagggcatgacgaccacggtcatcgacaaggtcaccggcgaggagaagcagctggtcgtcaggaagtacagcgacgccctgatgcagaccctgctgaagggagcccgccccgacaagtaccgcgagaaccacaaggtcgagcacaccggcgcggccggcggcgtcctggtcatcccggccgccatcgacaaggacacctgggcccaggaggtgcagcggcagcaggccaagtacgccgggaacaacgagggcggtgacgcgcccccgcccgcgggataatcgcagagcagcacacgccgggcgcccaacagggcgccctttccacaccccgagagatcaccatgtcctacgaacccgtacccaccggccgcatgcggctgagagcgcagcccgccgcgggctg

SEQ ID NO: 6 - DNA, 43667 bp, unidentified
  misc_feature 1..43667: note = the genomic sequence of a bacteriophage
  source 1..43667: mol_type = unassigned DNA
cgcgcccccgtacgcccacccggtacacaccgcacgcatcacacgcgggcgcgagacgatgcacgcgcgcgtcgcgagggacagccttgacgtacccacatcgatgtgctaccatcgcctcacacgcgcacacacgggcgcacacggcatgcgcgattcctctcccgacatgggctgactggcattgctgaatcgattcacaattctcccgtcgaaagtgcttgacatggccgacggcatgccctaatctacacccatcgcagcaacacaccgctacgacgcgacacagggcttgacacgggcatcgcagtacgccatgatggctcccatcgacaccgaacaccgggcatagtggcggcgcctacaagcggcctagaggcacatagcggcggttgcgtattctctcacgggttacgctagggttgagcgcacaggcgggacatctgtttcatttgctccctggtcaccatacggaatcacgaacatgcgtacgtacacagtcagcatcatctgcggtgcgttcggtcaggagaccggcgaggttcgtagcttccacgctgaggcccgtgatagggaagaggcacaagaggtggtgatcggctggatcgagcaggctagtatgtggcacgctgaggtgcagagcatcactcgcaccagctaagcatacggtaagactcacgaccgtatggtagagttgaattggtacacgtacaacagatagaaacggatcgtcttcacaagattcgtatctgtctttagaaccttcacggttagctccacagtatgcttacggtaagccttgacagttgccactgagcaacgtaagataggcccacagtcagcagacaccgacgacatagacagtagcttagacaggtacttgacattagccggacagtaagctaacctagcaacacagtaagtaacgcagcgatcctcgcagtgagacttacaagagacttgacaacgacctgcgggtcaggcacaatggatgccagatgtagagagtacgatctgactcatcggaacagtcgtgattgtatgacttagggctgaggctcgacggtcaacagacgattgaactaacgacagatcacaacgcggatgacgtaattgaatgcggcttagtaaaccgcagggaccactcgcaagagtgccgcgtaagctacgacagtagcactcatcacctacggtggaagcccgtcaagatgagtaagtcagtgtagtgctgacaggtgcgtcaaagaggatagcaagggtgggtcataccatctgcgcaacaagggacccgataggttctttcccaccgatggcttagtgcctacggttatagattcacccgaatgtataggtgcgggtcgagccacagcgatgatcgccaagagccgacgcatctatatttttgggttgaatcacaagggcattagtcatagtgtccttgcctttcaacctatgaggctaacgccatgacattcaagcagcttatcaaggggttccgcaagagccgtgttgtgctggacctgcgcaccactgcgcaagagcagcgagtcgctgacatcaagcgtaaggcgcagcgctacgagaccctcaagcacaccgcaggtaagccgagcgtgtatgctgaggaggccgcacgcttgaaccgcctgcgtgctgagttccgggctgacgcgagggctttcgcatgaagcgccgcactgataatgcactggcactcctgctgctcgtggtcgtagtgttcctgctgtggcagacgttcaagccgcagcccacacccatcgatgcacccaagggcgaggtgatcggcgcgctgccaagcggtgcgctcatcatgttcatcgacaacgagaatggcgtggcttgctacagctacctcgccgctatctcctgcgtgaggctacgttaatggtcaagccacgtatcaaggcggacccggtgctttcctggacacgtgagagcggcgagcgcgtcaccatctacagcgtataccacggtgaccgccaggttatgggctccgctggggatagcgtgcggaagtgttggcactggtacctgcgtatgcttgaggaccgaccgataaagctgcgaggtaaggactgatgagaaagccgcgcctatacctgagcaagaaccttggttgggtagcccgtcaccacccttggctgaccattaaccaaagcgactggctgttcgatctgtgcctacagctggacgaactaaacggtgtggtcatatgatcaccctcgctgcacctcaactggcggtgcttctctgcatctctgcactctcaggctgcgcattcggcatcggcctgttcctcatcgtacatcacaagtgagacctatcatgaccgcacatatcgaacgcaagatcaaggccatctcccgcctcggcaagaagatggacgccttcattcaggacactgccttgcaggtggtgctgcactgccacacccacggggaaatttccctgctgcacaagttgtggtccgccatgcaggacttcaagggcgcacgacacaaggcgatggacgagtggatgaagcgcaatgcgccggttgccctggtcgatcccgacaacatccccgacgacaagttcccgttcacgctggacaaggatcgcctgctcgatgaggccgggcgcaatgccctgtgtctggcgcagggtacaccggccaaccactggtacaacatgaagcccgacccgaagctggtcgaggagctggacatcaacgccatgttgaatgccctgctcaagcgggtggacagcgagagcaagaagaacgcagacctcaagatcaagggcgaggacatgctgcgcaagctgcgtggcctggtcagtgctgattgatctactgattggaggtgcgagtgtcgccgtgatgctcgcacttatcctacacctcaaccacatagaacaaatcgaggcacgccatgagcgttctgtatcactacagcaaggggacacttgagacagcactgattgtagcgtgggtggtgcgcgacaacatcaagctagccatcacgcagggagaccacgggacactgaggtacggcatctgttccgagtgggacgacgtggccgatgggcacaacgaggagtgcatgctcggtcgcatccgagatgggctgtactccgaatggccgcagttcagtggaagctcatggtatcctatcccgatgccagagctggacgaggacgactaccagacctaccttgcgtcggtcgatgagttcgacgacccgatgccccggcctcactggatgtacgagcaggtcggcaacatgtgggacggtgagtacggcgcgctgcgcatggactgcctggactggatgatcgacacgcttgagaaagctgtactgtaacagcccgtgcccttcgcaagaggggccacggcgatgcacactacccgcatagcgcagccgggcttggcctcccggtaagatcgctggacgcctagtgtgcatcgccgtgcgactggcacgataaccgaatgacaacgacatggcacaggtaactgtgaagttcaagcgcaaccgcgagacgcgcaccaatggattgcaggcgtggcgtgtggaccgcacgttctacatcactcctgccacgccgtaccttatggcgcaggctgactaccgcgaagcctttcgattctacgggatgatctaaccatgaaacactacgactatgcacacgagggattcaatggcaaccgtgagaaactatctggtccaatcagccgccgtagaaatgctcggtcggatggcgcagctctgcgacccgagcgtcatgctgcgcgaaaggcagggcaagaacaccggcgggccaagcggtccgatccatcgtgaggtacggctgcgcaaggtagtcgagcggctggacctgcgcaccggagagcaagtgaagtacatccacgatccagacatggacgtgggaagctgggaggttgcattcaacgtgcatgcaatcaaggatgctacgccgttcaccgatgagggagtggccgcgctcaactgctacggcatgaacaagaccatgctttatacattaaccgaagaggagtacgacgatgggcaagcagcgtaagggttacgtggttctgtacagcaccaatgatttggcgcaccacctcaccgtgtcacgtgaggactacaccgacggcaccaagttgccggacggactgatgaagttcgttgaccgcatccaaggtgacgacctgctcgccttgctgcccgagccgcaccagtcccagcgcgcagagggtatgagtaccttcaactcgtacgcactgatcacccgtcgtgctgcggcgcgtgccatcgtgcggcgcatgaacaacctgcgcatccacggacgggatgacttcaagctgctggaagtgggcgagttcgaccgcacggtcaagccggtcaagcactggaacatcgagcgccgttactgcctggtcggtggcaagtggagcgactgggaagtgtggagcaagggtgtctcgctgcgtgccgacgctcgcaagcaggccgcgaaggacgagcagtactggaacgaccactcttccaagggcggatacaacctgagctacaagttccgcgccgtgccggtgtacgcatgagcatcctgtcccgcatgaaaggtatgtgggctgggctggtgtccatgctgagcgacaccgaggaagtcgcgccgaccaagccacgcattgcactgcacgaacggacacatcccgacgtgcgtgctgcgttcgaggcgaacccgaactacgaggtggtggacgacaagccggtgcctcggtctgtgttgagcagactgttcgggtacgtgccgagcgcagagccctatatcaggctgcgaggccacggctacgtgcagggcgagacgttcgacgtgggcatcaaccgtgccaagcgtgcgatcaaggccatcaaggacaagcgcgagcggcgtgctgctcgaacccgattcatccagcggctgcgcagcagcggcatcaagagctaaggagtacacatggcacgtgacatctcgaacttcatccgcatcgccatcccgcatggtgcgtggtcggccgtcatctccgaagctgcattgcaggtgaccaaggcggcgggcggtggtacttcgtgggtcggcactggctcctggtttgacgaccagggtgcaggccatcacgaaaacatccgcatcttccagtggaacttcgcatcgcaggaatacccgcaggtggactacgctgcgcgtcagctggtcgagcgcatcttcgaggcgggcgagaaggccgtcatgaaggaacgctactacgacctgggcgtggcggagcagggccgcaccgtggcagggtacgccactcgcattctgttcgcaccgaccaagcactgagccacacctagcctaggtataaggccccgaccagctgggcgggttatcccggctacccatctctcactacacaaggaaccacaacacatgtcgaacaacatccgctccgccgctgacatctccgcccagatcgacagcatcaacgccgatgccgagctgtcgcagaccccggccgatggtggcctgctgagtgtcctcggtctggaagccaaggcccgcgccgccatccagaagttcgaggatgcatccgcatcgtacgctgcgcaggccgcagtgcgcgacgtgaagcagggcgatgccgtctcgctggtgttcggccgtgccgccaacaagcaggtgctgtcgggcaacgtgctgagcatcgagaatgcgaagaccggcctgctgttcaccgtgctgaccggcaccggcgctgcgtcgaaggtcgtcaacgtcggcgccgatgcgctgctgctgtcgccggaagccgtgactgccgccgaggaaagcatcctcgttgccaagctggaagccgagcaggaagctgccgccaaggctgcggccgaagccgctgccaagggtgaagccccggccgcgtaacatctgattgcggtgtcctcttgtaatgagagggcactgcgatgtgcactgagtagaaacgcagcccgtgttggtgcacggagtaagcgcccgcgaaggggactagcctaatgcaaagtaaactaccaccacagtgtgcatcgcagtgcaactccgcactatcaaggagaatgaaatgagcaagcagttcaagaagtacaaagcctgcaccacaaacagcaccaccggtgagctgacgcgcgccgcaaacccggaagcgtcgttcggagacactgcgtatttcgtgtacccgaccgactacaccgagaccaaggtgcgcaagctgatcgccgccaagttgaatcgcgccgaggactcggtgttcgtgaaggcatgcgagatcgtggagttcgtctgatgcacgacctcatccaccaactgtcgaacgtaggcatgaccgtgctggtcatagccctgctgttcatggtgctgctcaactggcgcatcgcagtgcagctgccgctgttcgccgagggcctgttctatctggaacggcagagctacgcacggcgcggtgccttcggtctggttatccagcgcgaggcacggtgggcatacgctgtgttcttgctgggcacgctgatgctgtggccggacatcgtgttccacctgtggtacctcatcggcaagctgttctagtgtatggccttcgccttcgagtaccgcgacaaggacgggtacgtcacccgccgtactgtggaggtggcgcagtatagtgcggagcatctgatcgggtactgccagttgcgcaggtcacgacggacgttccgcattgaccgcatcgttaactcggaagtcatcgacacaaccacaggtgaagtcatcgacgctaccaccggagaaataaaatgagtcacctcgcgcctgacgagtggttgccgcaggctgagcgcctgttgattggcggccgcaagtcagcgcgcggcgaccatgcatgtggtgaaccgggctccctcatgctgacgcgcgagggggcaacactcactgcctactgctttcgttgcggtggggtgggcaagcatactacgcaggaagatcccaaggaaaagttcgagaggttgcagcggcaggcagtggcggatgagttcatgcgtaacgcagtggaaccgccggagccgacgacgtacaacccggccaagtggcccgagcgtgatgcgttgtggttctatcgaatgggactctctccccgcaggatcaaagaactagggctgtactacaacgctgagtccgggcgtgtggtgctaccgatccgcgaggatgatcaagtggtgttctggatggcacgatcacagacggccaagcccaagtgggtaggtccgagcgtgaagaagcgtgggctgttcgccaagtacggacaagggcgaggcgaccacgtggtgctgacagaagacccactcagtgcatacaagataggcttggtgtgcgaggcttggtcactgctcgggacgaaggtgcatagtcgccacgtcttgcagctgatggaacttggtaagccagtggtggtttggttggacgacgaccacgaccactacaccggcaagaaccaagggcagatagcggcgcgccaagtgattggtgtgctgcgtggtgcgggcttggaagtgcagaacatgaccagcccgaatgatcccaagtactactcacagtaccaactaaaggagatgatgcaatgtctttccgtgccgcaatcaaacttgaccaactacaggacaagctccgcgcaatcctgagcgaccacgatgcgtgccttgtcacgaagaacaccgtgtacttcaatcgcttcgatgtgcagggactcaacgaggcacttgaagttccgaaggaagtgcctgtgtacgaggtgaacgaagtgcacagcacgaagttcccgacctgcccgccacgatacaacgtgactcggacatacaagggcaagccgcagttcgccgcaggcttcaagagcaaggcggatgccgacgagtacacgaagcagaagaacgcggccgctgcaagcgaggtggcggatcgatacaagctggagcaggtgagcgccacttggatctacgtgcgggatacctccgacaaggggctgatcagttcggtggttgccaagttctctaccaagcacgaagcgatggcgcgagaattcctcaagcgcatgaacgcggagtaatcaatggagcgcagcgagcacaccttgctgcgcctcgggctggatcgaaagacccacaccaaactgttcgacatcatccccggctctgcgctgacgggtaatgtgcttactctttgggaggcgcagcgtaagttctatgccaagttcaacacggacaagatcaccgacatcccggcgtggctgacgtggcttgaggaccaccagttcgcaacgatgaaggacccggatgcgaaggagctgctgctcactatcgcgggcaagctcaagtacggacccatcgatgagtccatgatcccgcagcttgccaacggctacatccaaacggcgttgagcatggaggtgatggacatcatcgagcggttccagtctcccgacaacgaggaagacctggacgtgatgttggtcgcagccaacgagaagtacaagaacttgatggagcgcagcgttcagtcgcccatcgagagtaccagcatggacgacctgtacgaacaggacagcatggagtatgggttcaagtggagactgcctgaactcgcacagcacatgcgccccgctcgaccgggcgatgcaatcgtgtgggctgcgcggcctgaccgtggcaagaccacgaccatcgcaagcgagatgagctacatgattccgcagatggacctcgtgtatcctgggcagaacaagtccttcatctggttcaacaacgagggcgatagcaagggcatccgccgacgcttgtatcaggcgttgctcggtgtgccgcagtcgcagatgatggcgtggcacaaggatggatcgctgctcgacaggctgcacgaagcagcaggtggcaagcatctgttcgaccgcatcctcatcatgtccatccacgggtatagctcgggccaagtcatgcgcctgatcaaggagcataaccccggcctgtgcgtgttcgacatggtggacaacatccgcttcaatgggctgagtacgaacggcggtacacgtacggaccagatgcttgaggagatgtacaagtgggtgcgcgacgccgcaatcatcgaaggcttcgctgcctttgaaacctcgcaggtatcaggcgatggagagaacgtgcagtacccgctaatgtccatgctcaaggacagcaagacaggcaagcagggtgcgtgcgatgctatcgtaatctggggtgagcagtccggcaacgagcgcggcaggttcctcggcatcccgaagaacaagctggtcgttgaaggtcagcctatgaacccgaagaaggagtgctacttcatgccggagattgcacgcatcctgtcattcgatgaagtcaacgaggagtaaccatgagctactacgaacccgaggaagaaacagatgagtcttaacagcgacaacgcaacgcaggttcgtcacctgtccgaaggactgttccgcagcctgggcaattacacagcccagaggcagcattcctacagcatcccgcactcgaacttgtaccggtggcgtgacacgctgaggaagattggtttccttagcacgaccaagtatgagccgaagcgcaaggtgcagctgctgttcaatcgccacgcactgtgggtcggcgcgcactacagcaagtacaaccgcaggctgtgcatcaacctgctgccgggcgtcaccatctgcatcacacaggcaggcggcatcgctccttaatcaaccgaggatcaatcaaccatgagtaagtacctcgcatgggacatcgagacagggatcaagcgtgcgctcaagcgcaaggccactcccttctacaatgagaacctagtgtgggcgataggctatcgcggatctggcgtgctggataaggtgggcttccatcgcggagtcgatggcataccgcacaactacttcccggacatgctgagcaagtgcaagatcctggtcgggttcaacatcaagttcgacttgctccacacactgcaagagccacagaactacgaggcgtggaagcgctgggtcgtggacggaggcatggtgtgggactgtcagcttgctgagtacctgatcgagggcatggacaagaagtggcacatgcccagcatggatgaggtggcaccgaagtacggcggcaacctcaaggacgacgcgatcaaggcgtgctggaacaacggcatcgacacgccggacatcgaccccgacatgctgatggactacctcatggggaccgacgagcctggtgatctgggtgacatcggcaacaccgaggcgatcttcaagggtcagctcgacgtgctgcgtgcacgtggtggtatcaagtccgcgatgctcaacatgggcgggctgatgtacaccgtcgaggcagaactcaacggcatgaagatcgccgaggctcgggccgaggagctgcgtgttgcactgctcggtgagcttgaggaggtgacgcagcgagtcgccgcctacatcccatcggatctgccgttcgagttctcttggtcgtctcgcttccacaagtctgcgctgctgttcggtggtgacatcaagtacaagcagcgagtgcacaaggaggatgaccagggcaacaagctgtacgccatgtcggacgaggtgcactacctgctcaaggacggcacgtcgaagaccgaggaggagatgaccgattgggattggggcaacgccgagcgcttcgccggtggtgctaagaagggacagcccaagaccaagaaggtcaaggtgcccgaccttgccaagcccaagatgacgaccgaggatttctactacaagttccccggattcgttgagccgctcaagtcctgggcgagcagcacggatggcgtgtactccacggcgagcgaggtcatcgaggcgctgggtacgtgggaagatgcgccgcccttcatcaaggactacgccaagcaggcgaagatcgcgaaggatctatcgacttactactgggtcgaggacgaggacggcaaccgcaagggcatgctcgcattgctcgggccggacggtatcatccaccaccagctcaacatggtgaacacggtgacggcgcgcttgtcatcgagcgatccgaacttgcagaacattccgaagggtgacaagtccgacgttaagacagtgttcgtctcccgcttcgagggcggcagcatcgtgcagtcggacttcacctcgctcgaagtgtatgtgcaggcgaacctgtcgctcgacaagaacctgatcgccgacctcaagaccggcatggacatgcactgcgtgcgtgtggctcaggctcacaagatggactaccagtatgtgctggaacgtgcgaaggatgaacaccaccccgagcacaagaagttcaaggcgctgcgcaacaaggcgaagaacttctcgttccagcgtgcgtatggtgcaggggctgcggcaatcgcagcagccacaggcatgacggtcgaggaagtcaaggcactgatcgaggcagaggagacgcggtaccctggtatcgtgcgctacaacgacagcaacttgcgcatgctcgaacgcaatcgcaagccgtcgtctctgttcgtgcagcacgacgaggttcgcggactgactgtcaacctcggcaagtcctacctcaccacgcctgacggcaagcgctacgtgctgtgggaatcctgctctccgaagttcgtgtatgagcgcgaaggcaagacggccacgttcaagccaaccacgttgaagaactacccggtacagggcatgggtggtgagtgggccaaggctgcgatgtggctgctggtgcgtgcgttctacgagcaggacaactacggcggcaaggcgctgctggtcaatcaggtgcacgacgcagtgtatgctgacgtagcggaggacgtacgcatcgacgctatggccctcatacatgcgtgtatggaggaggcgagtgtgctgatggagcagcacttcgactggaagatcgccgtgcctgtgcccactgagacggtatacggcacgagcatggcagaggaacatggcgagcctgccatgcgtgaattggtacacgtacaccggaagcacattcggtcacgttacctgaaagattacatcccatcatttgaacaggagaagaattgacatggcactcaacgcagcaatgaaggcacgcttggcgaaggcgaagcaggtcggcccgaacatgaacgaggcgcagcagggcggtggttcgtacaccccacccgctgagggcgttacccgcttgcgactcgtcgggtacttcgaggtcggcgaacacacggagcagtccggcaagttcatcggcaagaagaacaagaaggtgcagctggtgtgggagctgagcggcaagaaccacgagccgaccgaacacgatggcaagaagatcccggtgcgtatgacgcaggatctgaactactcgctcaacgagaaggcgtcgttctacaagctgttcgtggaactcaacgcgtgccacggcaacgaggccaccatcttcgccgagctgctgggcaaggaattcctgggcaccgtggtgcacaccaccaagggcgagggcgcagccaagcgcacgtacgccaacctcaccaagatccgcaaggccgtgcgcttggacgaggacgacaacgaggtgccgatcaaggttgacgagccgatcaccgagccgaagttcttcgtgtgggacatcgccacgatggaagactgggacgcgctgttcatcgacggcgagtacccggagcgtaaggatgcggcgggcaacgtgacgcacaaggcgcgcagcaagaacgtgttgcaggagaagatccgcagcgcgaacaacttcgactccctgcccatcgccgagttcattcgtgctggtgtcagcgccgaggacgaggcggacatggacgatgcgctgggcggcgacgacaatggcgatgacatcccggacgacgagtcgcagcaggagcagcgcgaagtcccggcaggtcaggccgacgttgacgatctggtctaagccatgactactgcggccgagcgtttgaaagaacacgcccgtaacgcaccgatgccgggcaccactgcccggccttcggtcgagggcatgccactccacatcgacggcgactacgccgcctactactgcgcaggcaacgacgagacatcgccgggcgtagctcgcgagaacctgctgacccgcatcgagcgcgcgaagcaggtgtccggtgccacccgtgccatcgtgcacctttcggaccgagcgtgcgacaagggcctgcgcttcttcatcgcacagtccaagccgtaccagggtcagcgcaacacggggcgcaagccccagaactgggactacctgcgcgagtacatggagacgtacgacggtactgcgttcgaggtcaagaactggtgcgaccgcgaggccgacgacggcatggcctacgtgtccgaagcggcgtacaagatcggcaggcccggtgcggtactcactgcggacaaggacatgcggatgttcgcaggtctgcacatagtgtggaagaccttcgagatggtggaggttctgcctggcacgtacgacctaatgcacgacggcaagcagtacgggcacaagtggttctggactcagatgcttcaaggcgacaccgctgacaacatcatgggcctgccgcgtgtcggtgaggttgccgctgtcaaggtgctgggcggtacgaagtcaaacgccgatgctttcccgctggttctggacatgtacaagtccaagatgggcgacgcatatgccgaccactttgtggagcaggctgcgctgctgtggatgcggaccgacaagcaggccaacgtcctcaacttcatggacctactcgcgggcggttaccctgcgaagccgtggtccgaggtctggggcgcagacgtggtgcgcgcagccaagcgcatgtaccaccgtgtgatggaggaacgcgatgctctctacgcctcgaaggcttaaagcatccgaggttgcaactgtgcgtgcccgcattgccgctgagcagggcgggcgctgcaagttgtgccaaggaaagctgggcttgaaagccccactcgatccggttctggatcatgaccactcaaccggtgccctgcgtggcgtactgcacagggggtgcaactccctgttgggtaaggtcgagaacaacgcaggtcgctacggtgtgtactcactgttcgcgttctgtcacggactcgcaccgtacctgcaagcgcacggtaccaacataactggtctggtccacccaaccttcaagacgcctgacgagaaacgtctcgctcgcaacgcgaaggcacggaaggctagggccgcaaccaagaaggaacccgcatgaaagtcacattgaaacaactgctcaagcgcgcaccgaagaccggaccgaagatcatctgcctcgacatcgagacattccccatcgagttctggggttggcagatgttcaacaacaacttcggcgttccgcagatcaagcgggactggtcgctgatgtcgttctccgctgaatggctggacgacgacggcaacttctacatcgaccagcgcaaagagaaggacgtgttcgatgaccgcaagcaggcgcaggccctgtgggaaatcctcaacgctgccgacttcatcctcgcacgcaacggcaagaagttcgaccttcgcaagatcaaggcgcgcatggtcatcctcggtttgccgccgctgtcgcctatcggtgtgatcgatccgatgctgctcaaccgcgtggagttcgcgttcacctcgcacaagctggagtacaccaccggcgtgctggtgcctgagctgcgcaagtacaaccacaagaacttccccggcttcgagctgtggatcgcatgcatgcaaagcctgcctggtgcgtgggatgagtgcgaggcatacaaccgcgttgacgtgtccggcatgaaggccgagtacctcaaggtgcgcggctggtactcgcagcatccgaacctcgccgtgtactacaagggcgacggcaccctgcaccgctgcaacaagtgcggccacgacgagatgatcccgcaggacaagcctgcgtacactcaggtcggcacctacctgctgctgcaatgcacgcagtgcggcggacatagccgcgcgcgtcgcctcaccaccaccatcgaacagcgcaagcacgtcaccgtgcccgcctaacaggagaactacatgagccgctttctcgaagcataccgcgttcaggtcgtaacacccaaggacgtggagaacggcgcaaccaagggaggcatcctgtggatgcacagtgaggtggaaggtagccccggctacttctacttcatcgactctccggactccgaccagggcattcccctggcggcagcacaggttgtgcgcgacgaagactgcaagcgctacgaccgctacctgatcgagaagcccgagaacgcgggtaccgaaacgctctcgacaccggcccccgaattggtacacgtcagcacgccggagcctacgcttacggagaacccgtacgccgacttcggtgccgaccatagcgtggggccggtcacgctccacgcaccacctgcatctcgtggtggcggcttgaagttcgacgccggtaaggtccgcccgtcgctactcatcaacggcatgccgcgtgcgctgctgcgtgtcgccgacgtgctgacgttcggtgcgcagaagtacgaggcccactcgtggaagaaggtggagaatggcgaggagcgctacaacgacgcaaagctgcgccacatgttcgccgaggccctgggtgacaaccaagatcctgagtccatgatcgagcatctggcccacgaaatttgcaacggcctgttcctgctggaaaaattcctgatcgccaaggagaacgcacattgagtaactccaccaaagacgcagcccgcctgctcaagtacaccaaccagcgcgttgtgctgggagatgagatggatgacgcggtgacatacgccatctcccaggtcttcgtccgcgcttccgaggatgcgcaggcggacatctatgcagccgtccgcgagtgcttcgatgagtacccgaatggcaccagccgcaagatcgcagtggtggacaagctgcgtaagtaccagctgagcaggatctatggctaagcaatcgaaggctcgcagcgtcaaggaagcaggtgtcaacatcctgatcgggtactcgataaactactccgcgaatatagcgctgctccctgtgttgtgggacaaggaccacccgttcctgagcgcacatgctgtaggcatcaccttcacactgatcagcttcgtgcgtcagtacatcatccgtcgttggttcagcaaaggagactgacatggcaaagaccaagtacatcacccacaccgcatgcgagttggagaaggtgccgaaggctgcgaagatcggcgaggccatcgccttctacctcgtgcagttgaagtacgacggaatctgcggcgtgctgatttacctcggcccggatcagtggtgcttccgcacacgtaccggcgaggcggtcaacaacttcaaccacatcggcgaagcgttcgcatctctgccgttcgatgtgttggccgaacaggttgcgagtacgttcgaggccgacgagggcgaagtgcttcccgatcagatgaagcgcggcgtgtacatcggcgagttctggcacccggactttgcagcgtccacggtcagcgggttcaataacctgacggacccggccaagatcgccgccgcccaatccgacatccgcaaggtgcagttcgttgtttgcgacttcgttacccacggggagtacatggcggggcgcagcgacgtgggctttgctgaccgcatcggccgcatcgcctggatgcagggaatctaccatcccgacgacggtggtgtgctgggcaagaatgtgcagccgcctgccccgcccatctggttcgccggtcacgagggctacttcaacgagcaggccgcgacggacgtgtacgccctggccgacgaggccgtggcttccggccgctacgacggcatcatcttgcgtaacgagaacggcccctggattcagggtgcgcgcgatgaacacgtggtcaaggtcaagcccttcatcacccgcgacctgctggtcgtggatgtggaagaaggcaagggcaagtacaagggaatgctcggcaacctgatcgtgtcgtacaagggcaaccgcatgggcctgtctggcatgtcggacgctgagcgccgcgagtggtgggcgaaccccgcgaccatcatcggccagatcgttgaggtcaaggccatgagtgagagcgtcaagggagtgctgcgcgagccgcgcttcaagggcatccgctacgacaccgaggtggattcatgagtgacgtgcacgtcgcaatccaccacgtgctcgaagaccagaccatccgagtgatgatcacaatcccgttccatgagtacgggcaatcgctgttccccaaccagtacctcaaagacaagatcaacgaggcggtggagcagattatggacgaagcacgcaaccggagataacatgcagacgcagctggaactggaagaagagatgtacgcctacggacgtgtccggatggcagacagcattgccgccaacgaagagaaggggcgcgcagaagcaaacccttacgctcagaagttgtaccgcaccttcctgttcccactgcgtgacgtgcttgtctccgagctatcggagaagaagccgggccgcaggcaggcgcatgcggctctgctggatgggatggacatggatgccgttgcgtaccttgcggtgcgcagcgcactgagcagcgcgatgcaggacattagcgtccgtgctgtggctatccaagtaggcaaagcagtgtaccacgagtacctgctgtgccagtttgaagacaagaatccgaagttgttccactacctactcaacgacatcgaccgccgcatgtcttcggacgagcggtacaagatgaacgtcatgcgcaaccaggccacgaaggcaggagtcgagttcaaggagtggggcaacgcacacgtgcagcaggtcggctactacctcatcgacaagatggtgcaggtcggcatgttcgacgtgacgaacaacagagagggcgcgctgaaccacgtcgagcttaacctgacggcagcagccgaggccatcgtgtctcagatcaccgagttcgtaaccgagatggcaccgtactggacaccgtgcgttgagccgccgaaggactggacatcgatcgatgagggcggctaccacaccgagggcatgcgtcgccttgatccctacctcgtgcacacgcacggcactgctcgacgcttcttcgagatggcggacatgagcaaggagctgcgctgcgtcaatgcattgcagcgtacggcgtggcgcgtcaaccgcgacctgctcgacatcgcgaccaacgtgtcgtatcacttcgacatggaagagatcatgatgcaggcggatacgccgaagccgcagcgtccgacgtggctcaccgatcagaaggtcgatgagatggacgaggtgcagctcaagtcgttccgtgcatggaagcgcgagatggcatcgtggcacaccgacaacaagctgcgtaagctcaagggctaccgcttctcgaacgtcatgaaggaggcgcgcaagttcgctgagtatcctgaaatattttttgtctacttcatggacttccgtggtcgcaagtacgtcaagtccaacggcattagcccgcagggttctgacttgcagaaggcgatgcttgagttcagcgtcggcaagcccctgctcacgcagggtgccaaggactggttcatgatcacgggagcgaaccgcttcggtgtggacaaggtagactataaggatcgaatcaaatgggtactggacaacgagcatctgattctggattgggcacgcaacccggtggactcgccggactggatgaacgccgacaagccgtttcaattccttgcgtggtgtttggagtattccaagtggcgggcattcggggacaagttcctaagccggatcagcgtaggaatggatggctcgtgcaacggcttacaaaacttctccgccatgcttcgcgatcctatcggcggaaaggcagtgaacttactcccgtccttgctgccaaacgacatctatcagatggttgcggaccgtgctatgcagctgttgcaggtttccgaggacgactcgccattccgcactatgtggattgcgcacgtgttaacgcggagcctggtgaagcgatctgttatgaccctcccgtacggctcgaagcgtacttcgtgtaaggacttcatcatccaagactacctcaaggctgggaagttcaaggagttggacccgaaggactacgagaaggccgcagcgtacctgagctacaaggtatgggaagcaatcggcgatgtggtcgtgaaggcgcgcgaggcgatggattggttgcagcagtccgcacgtgcgatcatcaaggcgggcgacgagaacatccgctggatcactccgacggggttcccggttgtgcaggtgtacttcggcacggtcgagcatcgcatcaacaccaagctcgcgggcaacatgaagatcaaggtgctgacggagagcgacgaggccaacctcaaccgccacaagaacggcatcgcgccgaacttcgtgcactccctggacgcatcgcacctgacgggcaccacgctgcgctgtgtggacgagggcatgaccgccttccacatggtgcacgacgactacggcacccacgcagcggacgccccagcgatgtacacggcgatccggcaggtgttcgtggacatgtaccagcagcacgacatgctccaagagctgcgtgatgcctacgtgatcctgtccgcaccgcccgagcagggcaccctggacctgacgcaagttcttgattcgccttactttttcgggtgaggttagtttcagtacacgtacaacagatagaccggctccccggctcgtgcttcggcatgggtcggggagctttcggccgtccgcattttggtacacgtacaacacaggagaaaccatgtctctcatttcagtacccgtcccggcagagaacctgtcggcggaagcgatcaagaagatcgaagccaagctgggtggtatggcgaacccgcagatcaatagtggcaccacgcaccttgaggctgggcagaagctgggcgtacagttggtgctgcgaatccttcgcgatggttggcacaatcagtaacttagcgcatctctgcatctgtctttaggtaccattagttagcttacataggagatagatacatgggattgagtagcctttggggcggaggtgatgcgaagcgagcagcaaagatgcaagccgacgctatcaaagcacagactgctgcgactgtacaacaggcaggtctggctgctgagcaagccgctaatcagattcgcaatacgatgcttaccgagactgctacgcagtatgcgaagactctcctcggtcggccaatggaacaggtcagcgtacgtctcgctccgcaagagcagatttctacgactgatcgcacccaacgtcagcgttctgtccgagacacttacatgtccggtggatcgtggttcacgtgaggagtaaccaatgaatcacttagtcaatacggctggtgcccgctgggctaagctggacggtgttcgtggtaacatcatccgtcgagccgaacgcttcgcaaagtggactatctccaaggtcttcccggacgatagctacaaccagaacaacgaggccctcagcaatgagtggcaatcccttggtgcgcaggcagtgaaccatctcagcaacaagctggtgatgaacctgtttgctccatctcgtcccttcttccgccttggtcctaagaaagccgccaaggaacaaatggctaccattgcagcggaacagaagcgggctatggagaataagctgtcggtggtcgagcgcgaaagctccgacgtaatcgaccggctcgcactccgcgctaagctgtacgaactgctcaagctcctgatcatcaccggcaatgcgctgatggttctcaaggacaagagcatgcgcgtgctgactatgcgcaactatgtggtgcgccgcgatgtcaatggctcgatcatcgagatgttgattcgcgagaaggtgcacaagtcggagatggatcaggatgcgctgacgatggcgttgcgctccggccagttctctcttgacagcgagggctgcgcccatcacttccgatggatcacgttcgacagcggcaagtttcgtgaggatcagtggtacaacgacttcaagctaccggcggactactcctcaagctacaccaaggagcgtatgccgtaccatgctgtgacgtgggacctgacatcgggtaaccactacggtactggcttggtcgaagactacaagaacgacttcgcttgcttgaccgcgctgtcgcaatcgactgtgttggctgcgatcatgaactccgagttccgctgggtcatccgcgcaggcgcaatgacttcggctcaggacttggcgaacagccgcaacggcgacgtgctgtacggtgagcagggtgacatcactccgctgccttccggcatggaagccaagatcgaagcgaacatcaacatcgcacagcagtacgtgcaacgtctcggcgctgcgttcctcttgcagtctgcgatcactcgacaggctgagcgcgtaactgcgcaagagctgcggatgaacgcggaggagttggagggcggcctgggtggcgcttactcccgactggctggtggcttgcaggttccgcttgcggacttctgcctggactacgccggttactccgtcaacgagacgaacttcgaggctaccgtcatcaccggccttgcggccctgtcccgtgtgggcgaccgcgaccgtctgatggagtacctgcaatcgctcgcagcggctgcggggcttccgccgatgatgctacagcgaatgaagatcagcgtcctgatgtccgaccttgcatctgctgtcggtctggatcgcgacacctacgtctacaccgatgaggagttcgcacagatgcagcagcaacaggcccaacagcaacaacagcagatggccgtacaggccgctgtccaacaggagacacgagcatgaccgatgaagtaaagaccaccgttacccccgcagtgacggaagtgccgaccccaacacccacgcccacgccgacccccgcacccgagaagaccgaaccggtcgataagggtactccgtattcggcgaacaccggctcccgtcagctggatgttgcgttgggtttcttcgtcaaccacctgggccttagcccggagtccccggaagttgtggaagcacagcgcaccggtaacttcgagtacctcaagggccatgcggcacagaagggcatcgcttccgaactcctcgatccttacattgcgctcgccgaaggtggccgcactgagctgaccaagggtgcggaggcgaagcaggcggaactcgcgaaggagctggacgagtatgccggtggtaccgagcagcgagtggcaaccttggctttcgtcaaggcaaactccaccgacgagcagttggcagagttcgatgaaatcctcaaccgtggtggtatcggtgcgcaggcgctgatgtatctgttcaagtccaagatgcaggccgatccctcggtcagcgtgcagggcaaggacgcggttgtccccaatgcaggcgcgcaggttccggcgcaggcgactcagtacgcgagcaaagaagactggcgtgctgcgcagcgtgctttgatcagcaagtatggcatcactggctatcagaccactccggaaggcaaggcacttgcggccgcgttccccggttaatcgttccaccaacaacaactagaaaggagctttatacatgagcaacatttggggtcccaccaatccggttaaccagaaccaggccctcggcgctggtccgctggatgcgttgcagcaggagcagttcaccggcgaagtggaacatgcctacatggcaaccaccgtgttcgagccgcacttcaagcgcaagatggtcgtcaagggtaccaacaccctgaccaagaaggccatcggccgctcgaccttgcagcgtctgggtcgtggtcaggcaccggacggcaagcaggttaagttctcgaaggcgcaggtgaccgtcgataccatgctgctgtcgcgccacaccttcgatgagctggaaaccatccagaccgacatcgacgcacgtgccgaagtctcgacgcaggcaggccgagacatcgcggacttctacgaccagaccatcgccatctcggcggtgaaggctgcgcgctacaccgcgaacccgtacggcctgggcgaagccgatggcttctacggcgctaccatccagaccctcgcagcgggcgacgagctggacccggccaagctgtaccacggcctgggccagatgctgatgaagatggaggagaagaacgtcaacccgcgcagcgagaaggtgctgttggctgttcgtccggcgcagtactacgcgctgctggacgcggagcagatcatcaacggcgagtacatcacctcgtccggcacgaagatcgacaacgctccgatgttcaaggcatggggcatcccggtcatctcgaccaacaacctgccgaagggcgtggtcaccggccacctgctgtccaacgaggacaacgacaacttctacgacggcgacttccgcaacgtcgtggctgtggctgtcggcccgaaggccctgatgatcggcgagtccaagccgctccagaccaagatctggtactcggatgagtccaaggtctgggtggtggatgcctggttctcgttcggcatcgcgccggatcgtgtcgagcatgcggctgtcttgcagaccgcgtaatccaactgggcgcagtgctaccataggctgcgcccgactcaattaggaggccacatggcaaccattgctgcaaagattcccttcgctcccggcacctacgtgcagctgtccgcagctgtcgatgtgtacccggacaagacgcaggcttacgtctgcttctaccagatcatcggcaccaccctgtacgtgcaggtgcgcgtgaacgatgattcccccgacctcggcacgttcgacctgttcattccggtgagcggcatcgaggccctgggcacgccgtaagaacacgccacgctctctaactgagggcggggcattattggtccaaggaggattcaatgtttatcagcaagctcgacgttgttaacgacgcgctgtcgtgcctcggcgaagcgggcctgactgacctacaggaagaccacgcttatcgcgatatgatcctcggcttcctgaaagctgagacggatcgcatctgcgcgcgcggctggtggttcaatcaggagtacacccgcctgctgcccgatgcgaactcgcgctacgtgtacgtccccgaggacgtgtactcggtggtgaccccggcgaccgggttccaagtaacgcagatgggtcgtcgtatgtacgactcgcgcaaccgcacctacgagtgggacaagccgattcctgttcgccttacgcgcatgttccccttcgaggacttgccgtacattgcgaccgaggcgatccgcgatgctaccaccgtgaagttccaaggccgcatcgactccgaccgcgagacgaaggccgacgccatgcgtactgcatcgctgtcgatggagcagctggtgcgccttgacgcacagaatcagaagcacaacatgctctaccggaatggtatggagcgcaatgcatggatcgcaacgaaccagcagtacccatcgggcgagcgagacatcctcggccctaacatcatcgttcactaggaggcatcatgagcaagaccgtaggcagcttgccatcgctggtgcagggcgtatcggagcaggaaccgcacaaccgtgcgccgggtcagatgtgggagagcgtcaacatgattgactccccgaccaagggcaaggctcgtcggcgaggcaccgtctactccgaccacatcgagctgccctcggccattaccgctgcactggttgaggcgcgctcgcagaccgagtacaccttcatcatcgacgggcgagaatacagcttgatctaccgcagccgcgcatcgacgctcggcaaggactacttcgcacagctgctggacaaggagtccgggcagttcttcgacatcgtatacgagggttcgacgtggatcgacaacctaatctccggcggcgtgtctgccattgcgtgcatcgggcggtatgtctacattgcgggcaacacgacattgccacgcgcaacgtctaccgaatcctggaactcgcccgacaatttgcagaagctcgcggcatgggttcgcgagggggcgtacagccggaagttcacgctggtgctgtaccacgtcaacggaaccaaggtcgagttcgcgtacacgacattggccgctgcgtaccctgagctgctggacacgacggacatcccgttctacaagccgggcagcaatccgcagacggcggacccggagtaccagaagcgagtcaacgaccgagtgaatgcgtacgagggcgagaagaccgcctggattcgcaaggcggcagaggacattgtgcccgcgaacatagcagccaagctcgctgagttggcggcgcaggcgggcatcatcgcttcctcgattggcccgtgcgttgtcgtggacgatccgaactacaacgacatccgcctgttggacgacgcgagcaacacgctggtctcctacgctgggcgcgaggtcagcgatccgcagttcgttacgctgtaccattgggcaggcaagatcgtgcgcgtgcgcccgtcaggtggtggcgacaaggagagctactacctcaaggccgtggcactcgaagagggcgctgttggctggaccaaggtggagtgggtggagactgccggtgtggtgcacgaaattcacaacgtcgtgtcccagatggtaatcgatcctgcgttgaagactgcgtatatcgcacagaacggcgagggcttgaagtccctggcaccacagctcggagaccacccggtctacaagccgaacgtggtaggcgatgcggtcacggctccgctgccgcactacttcggtcgagtgatcacctgcatgaccgtgttccaagatcgactcatgatcagcgcggacaacatcgtgaacttctcgcggtcgtcggactacctgaacttcttccgtgttaccatcttgaacatccaagacaacgaccccatcgagattttcgctcacgggtccgagggtgacacgatcaagcgggcggtgatgttcgagcgggacctcgtgctgttcggcgagctgcggcagtacgcgatcaacgggcgcgagttcctgtcgccgacgaacccgaacatcaacgtgatcgggaacttcgagggcggcgtgcgcgcgcagcctatcgcctcggggaacttcctgttcttcggcaagcatgcgaacgagcggacgggcctgcaccagatgcagccgggcgagacggcacagacgaccatcgtgtacgacgtgtcccaggttctcgacacgtggctgacgggcgagcctgtgcagcttctgggcaccaccatgccgaacatgatcacgtaccgcacggatgcggacccgtcgatttggtacacgtaccggtacgcagacgagcaaggcactggccgcgttatggcaagttggggaaagcagcagtatgctcccgagcttggcaccgttgcggctatcacgcactaccgtggcgacctgttcgtaatcacgctgcgctcggcaggaggcaaggactactggttcgccgacaagctgagtctcaacgtggacatgccgcgctatccgcatctggactcccaggtacggtacggtcaggagaccccgtggcacacggcagcagccagtaagctgtacgttgctgctgacaagtcctcggactacttcctgttgggcgcgccacgcgccggtgccgctgagtttgtggagcaggcgccgggtgtggagtccgcacttgtcgttggctccatcagccctgcgtacttccagccgacgaacccgtacatgcgggacagccagggcttgccgatcctcaacggtcggatcaccctgacatcgttcggcttccacctcgccgacactggcgggctgcgggcatacgtgttgaagccggatcgcgagcggaccttgctgttcgagggccgtgtgatcggacacagcagcaacatcatcgggcgacagccggtcttctccggcatccgcaccgtaagcgtaggccgcgagacgcggacctgcatcattgaactgcggtcggaagactggcaaccgcttcgcgtcactggcgctgagtggtccggccaggtattcatgccgcgcgcacgagggctatactgatgagcggtagtatcggtactatgctgcaagcgaacaacatcacccgcgtggcacgtgcgaagtaccaatccgccgttgccacgcaggccgcgaacaacaagttgaagaaggcacaaggggacctggctaactggtcacggtccctgagcaatcgtcggcgaattgaagcagcggagcaggagttcaacagcggcgctgagcagatcagcaacgagacacgtcaggctgggaagcagacgacgagcaacagcttgcaggcagcggagcagcggggcgcactactggcccgtgctgcgatgaccggtgtaggtggctccaccgtggaagcgatggagaacctcatcggactacaggctgcgacgactcaggaagagttggatcaggcagtggacaacatgcagtacagcggtaagcgcaatctcactactgccatgatgaacagctacatgatgcaggacttctcgcagacgatgatggacttcgacttcactcaacacatcgagccgaaggcaatgaagggtcgtgtcgcgaagctcatcggtgtggctgtggctacctacttcggtggtccgatggcaggcgaggcagctgctgacttcgctgtcggcgaatggcaggcggagaacggggacttccaaggtgcaaaccagtccttcggttcgtccatgaccaacgcgggtgcagcgtggaagcagtacagcgaccgcgatggaggctcgtggggcggagacgtgatccgtggcatgcgtgcaactggcaccagcactgacgctgcccgcacgacgggcggtgtatcaacgaagaaggcgcagtccgcatccagcggcagcaagtcttggttcaaataacaggaggcaacaatggcaggtattcagtttaaccccgtcggtggtctgcaaggcggggccagtggtggaggtgctgcggtgcctacccttggcatctctggcggcggcggggcgagcagcaacacgccaatgcgcagcggcaaggattggttcgacaacggcatgcgtgcggacttcggcggtaacatgccggagttcctcaacgacgtgttcgctgcgccgctcgctgtggcaaagcaggagcgcgagtggcagggctacatggatgcagctgcgggtacaaccgcagaagagattcgcgagacgaagccgtggtacaccaagctgttcgggccgactcagtacgagtccggcgcgattgcattcgagaatcagaagaaggcttcggatctgatccgcgactggaccctgcgtatgccggagctgcgcaagctgcccgccgagcaggtatccacgcagctgcgcgagcagatgaacagcatgatgtcggactccccgttcgccaatgctgtcttgcagaagagtctactgactcagttcgcaccactgctagagcagcatggtaaggagcgcatcgcttggcaacaggcggggctgctcaagatgcagacggagaacttccagtccaactcgtccacgtaccagctgctgatgtcgaaggctgcgtcgctcggtactgactctcctatggacatcaacaccgccaagcagttggaggcgtccaagtccgccctgttcgatgcgctgaccaccggcaggttgcagaacgacgatagcgtcaagtccttcatcatgacgggcctgcgctccgcaatgcgcaacggcgagttctacacggtcgaggcaatgatggatgagggcgtgctgtcctcgctgccaatcgaaactgctgagcagatcgagaaggcttacatcacggccaagtcgcagtacaagaaccgcttcactgcggacaacccggacttcgagaagatgatggcgaaggccaccgcgtcccgccacctgggcatcggcggcgagcctatgcttgcgcagctgcgggaaatcaacagcacgtactccgcgctgactggtgactccagcgggttctacgactccgagcagatggctgcgtacgccggtgatgcaacgtcgtcgtggctgcgtcggttcgagcggcaggaggataagcgggaacggcagcaggacaagcaggatcgactcaacgagaaggcagcagacgaggcggcgaaggctgaggtcgaggcgcgcaacacggcgcagctgcaagagttcttcgtcagcggctcccttggcgaggccatcaacatgaagaacgtggagaagggcgatgcagatcgtgcctcgaccgcgcgcttctctctgctgatgggcgagaacaaggtggaccaggcgatgggcaacctcgtgtacaacttcaacaacacgaagggcacgtacaagaacgatcagctctcggcgcagttgcaggccaacttgcagaacagcatggacgagcaggtgagtgatgcgttcctcgcacagcacgcgcagtggaaagcgctgtacagctcaccaggatacgccctgcagaatggtgaggtgcagctgacggacgcggcgcagggccaggccactgccatcggctactacggcgagactctcaatcgcaagatgaaggagttcgatgagaagtacagcaccggcagcatgactgctgaccgcgcttacgctacgaccttcgggccgtgggtggcagcgggtcgtccggacttccgtggtatcgaacgcagcgagcagaaggaagcgaccaaggcattcctcggagcaatccgtgggcagtccgcaggtatgttctcccgcatgttcggcaatgggttcgctttgcatccgtccgcccaggcgcagttggcacaggcggtcggtccgtactacgagcagctcgatgccggtctgttgccggagcagcgcgccaaggctgcgatgaatctggcgaaggcgggcggccgtatcgagattgtggcggggcagttcctgcactggaatcggaatcagcagccgctgactaagtacctcaacgatcccgatggcgagcgtacctcggtgctgttcgacgcagttctcaacgagcggttgaagtccgtgggcacgaagactgagggcaactccgtcgtcatcaatcgcctggccgacgagaagggcgatcccgtgtacgctgtgcacgtggagacggacgacgggttctacaacgtggacatccgaggctccgacctgagtaactacgatgaggccaaggcacgcgcactgcgagccaagatggaggcaccgaagaagccactgaacatcggcttccagctgcccgcagagaccgacaagcagttcgagcagtaccacggtatgagccgtgagcagtttgacgcacgcggaaagcgtaaccgtcagcgcatcggcgcggccctcacgggtggcgcagcaggtttgaccactgacgcactgaacaacaactaacaggagaacttatgaacactctcgaccttgcaggtctaacgctggaccagaagtttgaagcagcgggcaagttcgcgggtgttccctcgcagctgttcgcaggtatgtggtcggtggaatcggccaagggcaccaacatgacctcgcgcgcaggtgcgcggggtcacttccagaccatgcccgatacacagaacgcgtgggaagaacgcactggaaagaagttcgacccggacaatttcgatgacagcttgagcatggccgcgatgacgatgcgcgagaacatgggcaagttcaagaccatcccggatgcgctgcgtgcgtacaacgcgggctgggatcgctccaagtggggcaacgaagagacgagtgcgtacgtagggaagattgccaccgagggcggtatggccctggccggtgcaatgaccatgacgtacaacaaggtcaacccgaacggcagtatggacaccgcattcaatggcggcgagttcgatgaggcgctgttcgagaaggcttgggccggtgaggcgctgggcgacatgtcagtcctcaaggcttcggcaatcaagaagcatctgacggacgtggagaagggcaccgcgaacctcgcagctgtgcagacggcagcgatcaacgtgggcgacgccaatgtggtgcagatggcgcacgaggcgcaggccaccgtggagaaagacgctgcgcagaacgtggcagcgtacactgcgaccactggcaagcacaccacggacaccagcacgtccacgatcagcgccaaggaagtgcgtgcgcgtatggatgcggcgcttgagcgcgagcagtacgcacaatcgctgactgtcaacgacaagtggggcgctagcttcggcacaagcctgatggcgggcatgatgcgctatttcgacaacgatgtgggcgactcgtacccgaagggctggtcttacatggacagcgcgtacgagcaagagaagggatactcgatgaaggagcgtgagttcctgcgcgaggccgttaacccgcaggatgtcgagcgtatcaagggtgagatcgaacagcagcgctacgacgccaagctgcttgggcacctgtcggagtcctcgcggtttggttggtccatcgctgccgggttctcggaccctgtgggctgggctgcgggcctgggcgttggtaaggccgcgcagatggcgaaggtcggtgctgcaacgtatgctgctgcgggtcgtccgctgtctgcaatcgccgctggtgcagctgagggcgctgtcggtaacctgatcacgggcgctgcgctcgatgcaatgggcgactaccgcacgatgggggactatatcagtgacgcaggcttcggcttggcgttcggcggtgtgctgtctgcaccgggagccgtgcgcgaggcgcgtatcgcaggcttgcagaagagcatgcacgcacaggcggctatcttggacgcagaactcgctgtgcgtgcgcagcaagctgccggtcccggcgcaactccggaccaactggcgcgtgcgatgcagacaatcgaggagcaggacgacaacgcatggcgtcaggccacgttgggcaacatccccgacgctgaccgcctgatggcgcgcgctgacgtgggcgatacgcccgatcctgctgtgagctacagccgattcagcgatgatggctcccgcaatgcgtacatccagcagcaggcgttcgatcagagcatcgcgggcgacgatatgcgggctatggttgcggagttcagcaagcgaagcgacgatgtggtggcacgctacccgatcgatgaggccaagctcaagacgttcctgtcctacgctgacttcgaggcaacctccaccatcctgctcaacagcaagtccaaccccgcaaaggcgctgggcatcctgattgctgagtctccggagggtgcagcgggtcgtcattcgaccgcatcggtgtcccgcacggcgcacttcgagcagtacatgggcaacatcaaccgcaatacggaccagctgttcgacatgtgggcacgtgagcagggctatggcacgattcgccagacgatggacagcgacatccgcgtgcgcttcaacaaggaagtgcagttggagatgaatcgtcgctggaacaagcagccggagggtgcaatccacccggcagtcaagcgtgcggcggacatctacgaccagggctacaagatcatgggtaaggatcagcgtcacgtcggagttatcggcgcggatgctatcgatctgaacaccaacggctacttccagcgttcgtggaacctgggaatgctgcgcggcatgggtgcatcacagcgcgcggcgttcgtcaacgctctggaagaccagttccgcaccgtcgcgggcttcaccgacagcaaggacttcaacgttcgcgccttggcggtgacctacctcgcacgccttgagcatcgcgcggtcggcatgctcgatgttccggccaatctctactccaacgacgccggtgcaatcgttcgcgatgccctgcactctctggggctgagcaaggatgaggtcgaggcgcagatgaagcgcttcacccgtggtggcgcggggcataccaagtcacggatcgacatggactacggcaagaagtacgacgatggtgcgggcaacagcttcacgctcgtggacttcctcgacaatgacatgaacgggctgtatcgtcggtacgcacagcgcactgccggtgatgttgcactagccaagtacggcatcatgggcgagaacgggatcaaggttgcacgtgagtccatgctgcgcacgggcgctacgcagaaagagctgaatgccttcgaccagctgatggcagagatgaccggtaagcaggtcggcaacggtgacccgctgatcgcacagaacgcccgctccctgacgaacctgtcacggatgggcggcgctgtgttcccgcagatgggtgcgtatcttgacgccgttgtgggtctgggtgcgactcgcgctctgcgtgcagcaggtgcaacgaaccagatgcgcaaggaagtgcaggccctggtgcgcggcgagaaggtgtcaaacccgatcctgtccggccttgaaggcattggtccggagttcggcacggcggactaccgcatcttcggcatcttcgacaccccggagatggcggacatcgctggtaaggagagcgtgggcgtagtcaccaaggctattcgtggtggcgcgaacctgcaacgtgttctctccgggcaccgctgggtcactgctgcgcagacgcgcggcttcgctgaccagattgtgcgcaaggctctgcgcttcatcaaggagggaggcgaggatgtggccctaaaggacatgggcattcagggtgagatggtttctaccttgcaggcgcggttgaagaagatcgccaagttcgatgacaagggtgagttgatgtcgtttgatccgcgcaagctggacgtagacgacatcgcgggtcggcgcgcagtgattgcgttccgggactccatcatgcgtggaacgaaccagatcatcaacaaggagttcccaggtgaagtgggcaagtgggcgcataacgggtggctcaagctgctgtttcagttccgcacgttctcgatggttgcgcagcagaagtcgttcaaccgcatcctgcacacgcagggcgctgcaaagctcaccggcctgctgctgggcggtatggcagtcgccgcaccgatccacatggcgcgtgctgcactgcgtgcttcgctgatgaaggaggaggaccgcaacgagttcctggaaaagcagctgcacccgatggccctgggccgtgccacgatgaactacctcgctgcgatgggcctgtgggccgacgtggtggaggctgggtcgggcctgggcaccggctgggctgatgcgttcgggttcgatatgccggagggcatgcgccccacgggcggtcggaccatgaaggacacggacctgatcggcgggcagttggccccctcgctgggcgtcatcaacgacatcgggcagggcgtgatgggcaagccggacaagctgtggaagtccgcacccttcgcctccctgccgtacatccagcccgttctcatgggcatcgacagcgccctggacgagggcgaataaccgagcaaagctgggccacggacggccctagttttggtacacgtacaacaggaggaaacatggcgaccatcaccgatcccaccttccgcttcgccaccaacgttttcgacgcggacggcacggacaaggtgtacgacattagcttcgcgcttggctacatcgacggtgaatccgttgttgctatgtcaggcgtcgaagatccaaccacgaagctgctgggcgatatgaaggcccacgttgttagcttcacagataccccgcccggcaatcgcatcaaggtcagccctgtgcctgccgctgggcgtaagctcatggtgttccggcagactgacataagcaagctgctggtgcggttccaagatggcaagctccagacggggcgcaatcttgacctgaactccacgcagctgatcatggcaatccaggaaatcctggacggcctgcgcaacaacaaccagatcgtggaacagcagatcggcactatcgttgacctcaaccggatcatcaccgacatttaccgtcaggtgctggaactcttggcgtccggcggtatcgtgtccgttacgcccaaggtctgggcgggcgtgtggtctgcggccgaggacaccctcggagacacggacttcgagattgtgggggcggacgtttcagactccggcttctacgacacgtacatcgagggcgtcggccttgagcctggcacggacttctccgttgcgctggatggcgtgcccaagatccgctttgctcgtggcgactggcccgaaggcacgcgatggttcaccatcctgcgtgggtatgcgaagccgtacaccggcccgcagcccgtcaccacccttgcgtacccgatcatccggagtcaggcatctgcctacttcttggacgttaaggacgcattctcggtggtgttgctcaacaaccaatccgcagtgactgccaccctcaagctcatccccgaggctcccggcaataagatcactacgggcaccttcatcaccctggtacagcgcggcggcgtggtgtcgcttgcgtctgatccgggcgtcaacctgatcctccctggcggcaccgtggcgcgcacccgcgcactcaacagtgctatctcactcacctgcttggacgctgacgcgaacgagtggctagtatccggggacctcgctaagcaggagtagtcaatgcactttcgtctattcgatcgaccgctgatctttgatggtccgctgtcgtcaatgtacatcgacgggcagtacgcggactacgaaccaggcagcgcatacgagggccgtgtacaaatccacggctccgtaggttacaccaaggttgagattcttgagagcaacatcccgccgggcgcgtacgtctacgtggacaacgtgttcaagcaggtagtcgtcaagtggccgcagtacacgctgccggtcgataccttcaccctgcttgagaacggcgacttctcccaaggagacaacggggcgtggagcaacaccggccccaacaacccgttctccatcaaagccgacgacaagggtaaccagtcccttgagttcaagtctggcttcaagggtgggcattactctgagggtccgttcgccccgatcaaggacatcaaccgccagatcactgcaaccggacgcatcgcgcagggcaaaagctcgaagcgcaacctgtggggcggtatcgttctggtcttccacgacaaggatcgaaaccaactgaactacttggaaagcaactgggtaaactccggtggcgactacaaggacgttacggtcacggctgcggccagtgatgtgcgggccaagtttgtgagcgtgcgcgtgcagttcgaccgacgcgggcagaatcaccccggctgggcggacgacatcaagtggaatcactcgtggaccaagggctacaactctgacgagcagctcatggtgcgcgttcgtgtgaccgacgctctgggcaacacagccgaacacacaggttacatcgaagagaagagcaactggtacttcggaaagctcaacggcctgtacgtttacgacagcctggacatctccggaacaccaatctcgtggcgtccattcggcgctccaatcatgcctcccgagaacttcggaattggcgcatcggttgtggcattcgccacccgcgcgttcgtttcaaagagcagctatgcactcgatcaggtaggcattgcagcaggcgttcaagcgttcaagttgaacaatgttgctcgtcgcgccgaagcgcttcctgaaagcatgtccatcgcaagccgtgtgcgctcgttctctagtaagacgcacgttgcgtatgatcgcgcacgtcccgaactcatcaacatcaccgcagcggtgaaaggattcgttacccgatgaagattaagctaggcgccaaggggcgctttaaggtgcaggtcctgcgcgccgatgggtctgtccgactggaccggccctggcaggacaacctgatcacgaactacggtatggagtacatgaccggaaagtatcgcgatactatgggcggaagcaacctcatggactactgccgtgtaggcactggcaccactccaccggccaacggtgacgtggccctggtgtctcaggtcgggtacatgcctgccaacggagcatacagcagcatcgctccggtctccacttcgtctactccgtacgcaggctaccgggcagtgtacacgttcagccgtggtgcggttgttggtaacctgaccgagcttggtctgtcgttcctgacgaccggcagcaacctgtgcacccgtgcattgttcctcgacaccaacggtcagccggtcaccattgtggttgccgcagatgagcagctcatcatcacctacgagatgcggctgtacatccccactgttgcgaccagctcgacggtcaccgatcccacaaccaatgtgcagtacacgattcgggcactcccggtcaacgctgttaactgggtgtggatcaactacctgctgggcggtcagctcggtgcgagcaacggatcaacgttgagcaacatcactacctacgcctactacggtagcgacgctgcaatccggcagtggcacaacacgccgctagggactgagacatacggcggcgccgactaccagaacgtgccggtaaatgacggcacgtactcacgcgatgccgtcatcaccatccgactcgaaaccttcaacggcatcgatgtcaaggtgctacgcttctcggagtcctcgccctcgtactttgcgccgctcaactggcaattggagttcagcccaacctggcgcaagacgaatgaccagaccatctcgcttactctccgcctggagattgcgcgccgatgatcccagaactgaccctagctaaggcgcgagccgggtgggcgcaggtaatgggcagtcggtcaaagcccctgatcaactacgcggtcgggggtccgacgcttggagacggtgcagaaatcgcaggcaccacatgggttgtggagtacgtggacccagaagtccgcgtctacaagcaagagtcgccggaggaatactccgtggctcttagcctgcccggcattaccttcgtcagcctggcctttgaccagagcatgcgatgggctgtcggcttcactcatgaggacaagggcaagctgctgtggtacgactccattgcagcaggctacactgtacttgaagtcgcaggggctgtaaagcccttcgtggctctcgacgtgcgggacctcgtgtacgtcggcgtgagcgacatcatcgtttcatacatgcgcggcaccagcatctacacccgagtgcagcgggagcggtttcagactgagcgcttgctcaaggctgatgccggaagctccctgtctcgcttcggcctatccgtggtaaatcgcctgcaatggcaggtcatgccctaaaggagcaagaatgaaacttcccgtcagcgtggaactcgcagctgcaaccccgttgacgggtctgtctctgtttgcatcgtggatgactgcgtactcttcggtcatcatcacgaccctcgccatcgtagccttcgctgcgcagatggtgtggcgctacatcgaacaccgcgcgatcatgcgcaagaactcaggaggaaccaatggctaagaatgccgcagcagaaggtgccctcggcaccctacacaacacactcgccacagtgttgaccgccgcaatcacggcggagggcggtgcacccgcagcgatcctcgcggtcgcggcgaagttcttgaaggacaacgacatcacttgcgctgccgacaaggacaacgcgatgggtgagctgaccgaagcaatggaagcggcgcgtgcgccggtgagcgaaagggacaagcaccaggcgcttgagggcgtgctggacttggcgcagtatcgcgccggtaatcggtgagtaccgacaactcttggcgcgctgagcagctcgcccacttgcagagggagtacgtctccttcgcggtgttccttcgcgacatcatgtggttcctcggcggctggactccgacgtggatgcagtacgacatggcgaactacttgcagcacgggccgtcggacctcatggtccaggcgcagcgcggcgaggccaagtccacgatcacggcaatcttcgctgtgtggtgcatcatgatgaatcccaagttccgtgtgctgatcgtatcggcaggcggcaagcaggcaaacgagattgcaaacctcgtgacgaagatcatcctgttttgggagccgttgaagtgcatccggcctgacaagtccgcaggcgaccgtacgtccgtcgaggcattcgacgtgcacttctcgctcaagggcgtggacaagtccccgtctgtggcgtgcatcggcatcaccggcaacctgcctggtaagcgagctgatcttctgatcgcagacgacatcgagtccccgaagaactccatgactgcgggcaaccgcgagatgctgctgactctgagccttgagttctcggctatcgcatctggtcagcccggcattccgccgcgcatcgtgtaccttggtacgccgcagacgagcgagtccatctacaacaccctaccgggtcgtgggttcgacgttcgcatttggcctgggcgcttcccaacgcagaaggagatggacaactacggcccgcacctcgcaccgcagatccgcaatgccatcgaggcagagccgagcttgcagtacggcggcggcatggcgggtgacatgggcaagcccaccgatccgaccatgttcgatgaggagacgttgcagaagaagtaccaggatcgtggggcatcgagcttccagctcaactacatgcttaacacgaagctcatggactcccttcgcttcccgttgaagaccgaagaccttatcgtcatgcctggtgcacccaccgggaaggtaccgcagatcgtgcaccgtggtattggtgtcgcgaatcagaaggtctaccagtcctctggtctggctttcacttgctcccagcccatgatcgcatctgacgtaaagatgatcgactatgagggagtgcacatgcaggttgaccctgcgggtggcggcgctaatggagacgagacgggcttcgcagtgacggcgtacgccaacagtaccatctacgtcctcgccatcggtggtatccctggtggttacggcgacgagcagatgacgatgcttgccaagatcgcggagacgttcggcgcaggaactatcagcattgagaagaactacggctacggcgcattcgccaaggtctggctccctatcctgcacaagacgtggaagggtacgatccttgagccttacgtgggcggtatgaaggagaagcgcatcatcggaaccatcgagcctatcatgggccgtggctctctggtcttcttcgagtccgcgatcaacatggaccacgacctcacggagttctacagcaacagcggcaaccgcaagatgtactcagtgttccaccagctcacgaagatgcaggccctcaagggctgcgtcaagcacgatgaccgggcggacgcactggaaggaagcatccgtttctggatggatcggctcaaggtcgatcagcacaagcgcaaagtccaagaagaggctcgcgagtaccagaagtggcttgatgatcctgtcggctggagccgcaaccagaagcccatgcgtgtagtattgaacgtgggcaacaagtatttcacataaggaggaagctatgcagcgtcatgaattctcgaattggatgtccacctggggtggcggcaatcaactggttaccgagttcgttcggctgaccgactacgtaaaggtgcacccgaagcacgcaacgcagatccttgcgctgttcgatgccgacgttgccaaggtccgtgcggacctgatcgcatcgggcgccgtgccgcctgtcactccggagggctaatgaacaagctgccttacatctccaaagcgtccgacctcggcatcgctctcacgttggccgctacaccggcggaagctcgcgccctcttgggtgttggcagcggcggaggtggaggcggcgctgtggattctgtcaacggacagaccggcgacgtcactctcgacgcagccgatgtcggcgctgcgcctgcgggcgctccgctgtcctcattcgcaaacgacgtgggattcatcaccgacgcagacattcccggatcgcccgtgctgagcgtcaacgggcagacgggtgcggtggcactgacagcgggcgacgtgggtgccgcaacgacggcacagggcgctaaggcggacagcgcattgcagcccggagacatcccggcacagtccgtcaccagcgtcaactccaagaccggggctgtcgtcctcagcgctgccgatgtgggtgctgttccaactactgccgtaggttctagcgtggctccgcttgttggcgggttgctaccgaactcctacctgccaccgcttgccatcacgagtaccttcgttgtgtcctcgcaggcagcgcagctcgcgttgactgtgcaggagggcgacgtgtgcatccgcacggacctgggcaagagctacatccgcctgaactcgtcccttggtacgatggccgactggcaggagctgctgactccgaccgcacccgtgcagtccgtcaatggcaagaccggcgtggtgtccctcaccgcagctgacattggcgtggtcggcttctacgttcctggcttcatcagtgggctgtctctggcgtgggtggacatccataccgtgagcgtgtctggtggcacggcgcacaaccaggccgctgacgccaactaccggcagaccgccgcagcgaacgtcacgatcccgagtactgcaagcacgttcttccacatctaccagtacgggaacaacctgcttgaggtttccaccgcagctcctaccacgccgtacgtcggcacggctgcgagcaagtccggggacacgtcgcgccggtatctcggctccgtggttacggacacatctggcaacgtggtcaagttctcccacgacggcgatgaggtgctgtataccgaaggcatcgcacgcagcttgtctggcggtgcagccaacgtgttcaccacagtgagcctgtcggcgctgatcccggccggtacccgcaccgcgctgctcgctatgaccaatggcagcactactgtgccgatgcgcgtgcgtcccgtgggctatgcaaacagcttgaacagccgcatgtacggcatcacaggctcaggcttcgcggctggtcccatcactctggtgggcgggctgaacgtggagtaccaggtggacgccaacggctccgcacacatcgacgtattgggctacaagctctcgcgttaaccataaggaggaacaatgaagagtagaatcgtcgctgtagtgggtgcatccctcctgagcgtcgcaggcttgttccatatccagaccagtgaaggggtgcgctacacggcgtaccctgatccggctactggtggggcaccctggaccatctgttggggccacaccggccccgaagtccacaagggtctgactgtaagcaagaagcaatgcgagctgtggctcaacgtggacctgcgcgagcatgagggctacgtccgcaacctcgtgaaggtgcccgtcaagcagggcgagtacgatgcgctagtgtctttctcgtacaacgtgggtccgacgaaccttgcgaacagcactttgctgcgtaagctcaacgccggggaccgcatcggtagctgcaaggagtactccaagtggatctatgccgataagcgggtcttccagggcctcgttacccgtcgatacaacgaacaggccatgtgcctcaagctaggagactacatctatgatccgcggattcgctgattacatcattggcgccctacttatcgtcggcatcttgctaagcgggtactccatgtacctctcgcagcggttggcacacgagaaagaggtcgcccaggactccaaggctgaggctgcggggtataaagtctacgccactgagcataagaaggtggccgaacagaaggaaaagactcatgttgaagttgaagaagcgttgcaacgacacgtggagtgggctgatgttcctgttcctgatgagcttgctgacaagctgcgggatcggaatccctaaggagttcctcaagccttgccacaagaccatgttggccgacgggcctgcgaagaaccgcgatgtgttcaacgtggctgtggatagggggttcgacatcgacgcatgtaacgcggacaaggctgcattgcgagcttacatcgaatcccaccctggtctccggactaaaaattgatagtctcgtgcgcgggggtacctcagatcgcaggctcccgcgcgccc

SEQ ID NO: 7 - DNA, 76340 bp, unidentified
  misc_feature 1..76340: note = the genomic sequence of a bacteriophage
  source 1..76340: mol_type = unassigned DNA
gtcagacgttgaggtagagcttcatgctgctctcgataaatctggtccatatcagttttccatcaggctacggtcgttacgaatctgcttactcagggcttcgatttgtcggtcacggagtccaagagttgaccggtactcacgttccaagcttcgcccttgttcaagagctgcgtcgagtcggcctgcatggcttgcgagacttcgacactcaatggttccagcttcggcctgacgttcgtatattgccgtgcgttgggtgttgagctgcatgcgcttagcaagatcagactgcaaggaagcaagttcaacagcatgcttttggttcgcttgtgaaagctcataagtgatcctttggttctctgcacgatgcacttgttctttctgtgcatagctatctttgagttgttgaatctgcgcaagatacttggctgtgtcttgatcccattgcagttgaacagaagcggctccctcacggaagccgctttgtttgattgaacgatagccccaaaaactcagggctaccaatgcaatgagaaccaagatgtgaggcaagtacttaatgagggtcttttgccacatcgaaggtatctccgaaatcagtacacttggtcaatggtacgttgccaatccggtgatcgacccatccgacagtgaatgtcttgaggttcgtcaggctgacgtagtgttgtgcttgataactgtccagcaacttgatcgtcaactcacatgccttgaccttgccacgtacacgttcaagactctgatatgcccgaatcgaagctggtcctaccttaccatccacggtaagttgagggtagtcttttccgtctcggttgagagcattgagactggactgaaaccacttggagccgcgagacggtccagcattcacaccgatgtcagtcagcttccaagcgacagcaggactgatctcaatcaagggtgcatagcccggcttgacgatgtagtcgttgtagtagatcgagttggcagcttcaacagacagatctcgcatatgaccggtataaccattggcacgagcaacctgctctgtcacaccgtgattcgttgcaccacctggatcagcagggttgttgacataaccgccttcgacagcaaccactgcaccaatgatcaacgcagcgatacctgcgataccagttttctttccattactcagcttctgattctgagccatctgacgttcctttgaactgtaggacacgggcaatcatcgccaagccgagaagaacgatggtgatgctttttccgtgtggaattttattgagtgaacccaggggaatattggagacaacgaagtctgcaatgttcagtagaaaggctccgcccatgtaccagatacttccaaacttccaactcttacgccagtttggaatcagcttgatcatgggccaccgccagccaaccatgcagcaatcttttcacgaccagtcagcaaagcagtgaccagtgctgtagcaacaacccatacccatttaccaaactgtcctgcacctacgaccttatgcttgatcgtaatgaagtcatcgataacaggcttctgcgtggtgaggctagtctccacattctgcattcgttgactcattgcaatgagctgctcgttctgagctttgagttgctgaagaatgtccttatttgattcagcgtgggtcttgagacgctcatccatgcgagccaagagaacatcagtagattcagccattgcccctgtacctttgaagtgttgcccgcagtttagggcaatataaaggccgggggaactacaagttcacccggcccagtagacagcatcgtctatctcaagtgcgcctcagattccactgaagcctgttgacggagttcagtccaacagtcagcagctcaccagggagattcgacgctagaacgtattctacgccatagcgttcacgctgcaccctgaccaccaaatctgtacctttcttgtaggaaaggatgatatcagcttggccggaaaacagggaacgtttttcgtcgagacagagcctggggctggtagcccctggaatctccatcgtgcgcatcccgttctgcaaggtgtcatagtagaagaacttgcacacgcccccaaccatgtaggcaatgtgcggctgcatcgcttgatcgaatgccagagcaatctgggtgatacccggttcagacaagatcgttacaggcaagactccctcacggaaaacctcgactcgtccttcaatgtactgggcagtccagagtgctgctgtcaggttcgcagtggcttgtccaaggacaagaccaccacgttcgtaatcaatcaatggctgtgctgagcggttctgttgttcgacatacgaaccacggagcaccttctcagaggctcggggaatcatccggtgtagcgcccccacgccatgcgaagagtcagattgacgatctcatcagaagtcttgggaacgccaggagtaatgccaatctgatagttgatcgcagcactaagagcacggaaaccagtgatcgttgcattgtttgcatcattgattccaagtcgcgcaagttgatctcgatacttactattcggagtgtaggccaaagtggccaactgataatttgtaaaagttgactcattaccatcaggcttgcctgtagctggaccagcaccagtaccccccaagtaccaaaagccagcccaaggatatccactgaacaaaatagtgccgctgcccccaccagcttcgctggtacccaacatcgtaggacgaatagtaaaagtctgctgtacacctttgatcgtctgagtctttacaacatcagccatatgggcatagcaacgaatctcatacgtcacgatgaggatgtcaccggtcaacaacgtgacagtcgttggatttccttgtgcatctttaatcaatgcgtgcgtgaacaacttgcgtccattgatctggttattgaacagaccaacttcagcaagattgacttcagctgccgcaggattgaactgaaattcctttcgataccatgcgtagaacggggcacttgtagtaataccagcagccgtatttgctccattggcagtctctgcattgaaagcaccaaacgttacatcagtgaatgcaggaggcacagcagaagtaccaacaccaattgcactcaaccaacttgagaggtattgaagatcgataccttcttgctgactaccaccgaccatttccagagcatagtcggtaatcagattgtcttgccacggaatcacttcctcacgaatgccagtagcagcacggatgatttcacccttgaagacaccagcgtaggagtgctggatttcaatgacttcgtttttgttctgttgctgcttcattacccataactccaagtgacagatggggtgttttcaagagaatcaatcggcatgttgagacggggaagtttcttaatttcgaagttggtgagtgatggtgtatgttcgaaagcttcaccagaagacgtactcttcctaaccgtagtcacttccatggagacaagtgagggagagtgagtaaattcttccaaacttggttcaagctttttacgaacactattgatttcaaaaattacttctggattttgttgaaatgcttctagctctcgcaatgttccaagcgtacgcaacgatgcaactgtcgggttgttagtaaagtcatcccattggtagaacggatacaactgactggtaacagagacaccatcttcagaaatgataccttgccacacagcagtacgaccagtggaatcagttacttccaagatcagatcaagatcaccttcaggtggtagctcattgatatctggatacaccagatggtcccagctgaagttgtccaaccacacattcttgttttcacggttacgaataccgaatgcaccaatagcaacatcgtgtgcattctcaggcggaacagcagtgacctttgaagggaacaccttgttcttgctagctgacatcacagcattgccctggctcacgtccagctcattgccatcaatgtcataccactgaaggatcacggcagcaccagcattgccttcagcactcgcaccttggcgtacatcacacattgctgtgatggctttgccttgcttcactcgaaaccgactggtggagacaagctttgagataccacgctcagtagcaaagcgaccactataagaaccagtcaatgcgttctcagttgaccgatcccacccaagtccgtactcccaaaatcgagcgctctcttcgaatccagcattacgaatgacagcaggaggcgtctgatattcatcagcacgacgaacccttttccaactgatgacaacttcttgagtgtcctcatcgatagtgaagcgtgtggtacttggcagcacactgccaccaatctgacgtgccttcgatggaccgatggcattgatcagttgcagtcgcccttcgtaatcctgattcgaatcgtagtcaggcagaagacctaccacatagagtggtaggtacgacttgaccttctggacaccaacaggacgttgataaatccaagtcgtcattcaacgagcctctggccgagcaggtagacacgcaaggcacgcccagtgccattgcctacctgagtgacactgagagagatgacgtctcccttgttaagcacatcgcctcctgcggcatatgacaccggagtcgttgcactggttgaagtcatctcgttgttgtcgatggtgagcttgttcgtcaggatcgatgcaccgttacgcaagatgtccatcgtcaagatggtgccatctgtttgtggctcagagagcgaaccagtaaggccagcattgaccaccgagtccagcttcatgctgtatggcagcgtgtagctatccttcttcgttcccacagtgatgccggcagtactggcaacagaacgatcgatcagctcaatctgcatcacgtcagaagaagcaacttcacggaacatgtcaccactgatcacccactgattgccatcagcattgaagcaggtagccgagataacgcaatcctgcccacgagtggtaggactgaattcctgtgctggatacagagtgccatcagctggattctccatagccaacgtcactgcaccagtaccacgctgaaggacactgaagaactcaccgttcttccaatcctttgtgtcatcacctgtcttgttgcgaatgagcaacgtcagaggaacattcgagttgacgaccagcaagctgttttctttggtgcgatcaatgacagtgttgttgttgatgatcgtcgtatcaacttcaggtgccacagtctcgataggagtcggagtctgatacggcttggcatagccacgcagaatcgtgtatccagctgcattgtcattgagtggaaccaagaagcgaatcataggagatgcaccattgatcggtggatcaatagtgaagtcaacaggattcacacccacgtagtctttctcaccgggagtgttttccacatacgtatcgaacagcaacttctcgtatgcatcggcaccatcgataggaaagccagtggtttcaccatcaccaaggaatgcccagtaacgaggcagcacactgccgtctcctggcgtaccttcaccaccaccagggtcagtaccttcgacgtagccgtagcccatcaacgacgtgtactcagtcccctgagcaccattcgtgttgacgtacaagccaccagttgagatgccttcattccgtggacggaagacaacttcaatcaaaaactgctgaccggggttgagatacggtggtgcatcactggttgcagtaaacgaaccagaggcaacgatctcaccgatacgcacaggactcttaccaacgttggtcacaacgatagtacgaggcactgacgaacgagacaggatcacgttgccaaacaccactttggcaggagccacagacacctgatacggatatgggaatcccaactccgagcagatgatgcggcttgaatgatcaggcaactgggacatggatgacctcaacggcagtcagaaaccacacgatgtctgccgtctgcaaagatgctggtgcattactgttcaacgtaatgacaacaccttgtgcttggtagctcacagtgaagtaaccagattcgctattgcaacgattaccagtgattggatctttcaaccagatggttgaatccatcacaccatcgagcagaaccaagggaggaaatagcagcgaagtagtcgtaccgaccattttccctagcagggtcatacgacgccaaggatcagctgcaaccttttcgatgaatggcatacgagacgcaacgaagcgaatgatctcgtaagccttcggaccaagcagacgatctaccaacggattcaatccaccatatggatcaagatgattacgcattagacgaagcctcctttttgaaagcgagtgttggtggtggaagttgaaatgctgacagcatcagacatcaatgcttcatcgcacagctgggtgaacattgtcaaatgttcctgagcttttgctgaggattcagcagtggccatgttcgtgtacttcttgtaagcgatgtaagacaccaacgcttcagtcagcacttcaggaagcatgatctcttgctcaagttcaccatccaacttcggatgctttgcttgataagtgatcgacaagatctgcccaggaattggacgtgatacttgaaggacatttccttgtggggtgaacagcgagtttggattcccatcatcattcaatgggtacgaatatccaaagctgttgtagacctgcaagattcgaatgacatcatcagtgaaacgttcttctggaagatccagaatgtaacgccaacgttccgtactgctgctgtcgtgcggagagaacttactgcgaagatggtagttggtcgtcagctcattcatcacgaccatgacatctttctcgatcagattgaatcgagtgtagatgcgaagcaatgcatcattcgcatggctgataacttgaggttgattctgctgatcgatatagcccgcaccgcttactcctgagaagagtgccgagtacggaccatacgatagcttctcgaatagatcttcgacgttcatcgaggtcacacgatataggagttgatggcaagtccctgatcaggtacttggtcgtgttcccaccgatccacttcttcaggggttgccggtgcggtttcagaggggagccaaggcttaaagtaaccaagctgactgatcgtatcaagacagtcgtccttgcccttaatgccagactgagtgaccagtcggatctgccccatgaacatgcccatgataacactccccttcatctcttcagggaaatacatcttgcctgccttgaaccaaggcaccacgagattgaagcggaccagcttgtcagtgcttgggcgaataccaggatcgttcgacttgctgttgctggcgaagttgaaccagatcttccggaccaacatctcacgctgaagccaagtgatgaaggcattctgctgaccgctgacttcgacgcctacctgctgagggctgtacttctgtacgaagtagaacagcttgtcgatggattcatccatcgtcgttcgcttagcaaagccatctacccagaaccaatccccattggaattgattgcccaaaccgagatgacactgtagtcagctgtcgtcttcttacttgttgcaaagtcagtggtgatgtagaagttgaaacttcccatcccctccatcaacttagcacgcgagtaccagcggatctcagcatcctgcaccaagcgttcttcttcagacgtaacctgaagcatcagctcttgcatgaatcctgcgaccttacctgtaccaatggatagatcgtattgacccttgatgaagtcaaaggtaaagcgatcatcccatgcaccacgaaactcttcccgtgtacaaggaaagcgttcgcatactggatacacgttgacatcccactccccagactcgactgcttcaacgatcacatcttctttgttgaatggcgtaccgttgaatacgatcttgcgacgagtaggatcaagcgcatggttcacaccgttatagacagtgttcttgattgcatccattgcagctttggagttggcatcaccatcaccaatcaagtcgtcaaggatgcaaagcgtaggacgtttaccaaagatctttgaaccacggataccagtctgtgcaccgaacatcttgatgccaagcttgtgtccatcaacagactcaaactccagatacgggtcagtgaaggtagccttcttgatccaacgctgaaggaatggactgttgttgtaacggaactcgatgttcttacgagcgttcttgacgccgttctccatggagtccgacacatagatcattgcttcaaccttgccatgcccaggcaagtaaccgaacactgcgagatacagtgtcatgtactccatgaacactgtggtctttgcagcaccgcgaaagagaaggttgaccagatagtcactggtgctttgtgccagcttatcgagcatagccaaatgcacagggggagtcttgttagactccccttgctcaccgttcactagcttgatgaagttcatgaactccatcgcaaaggtagttggaatgtagtccgtactattcaagaacgaatagtcaacatcatccaaccactcttcgagtgactgtttaatcttggccatgttcaatcactcgaccaagcttctgctcagcgatctgacggatcggtacaccttgtgcaacttgagagatctgagcttcagccagttctcgcaatgcacccttgagagattccatacctgtatccgtgacattgatgttcaccaatggtgccatgtctttcggcttctcggtatgggcaagcactgagttggctgcggtggttcgcaccatctcactctgagcgttctgcatcagatcaacctgcacgttcaatgccctctgtcgtgcttcctgattgatcagccagaacgggatcatggcttgctcaaggatagcttgtaccaacttacccttgtggtacatggccacataagcagaaatggtcttggcatccagcccacgtgcgagctgatccgcattacgttgtgggaacgtccgagcgtaggactctccgttgctcagacccatcatcttgtaggtgcagtaggcgactgcgttgagatagtcctcagtcttgaacttcccttcttgcaacaccttcgtataggtaatgaagttctcacgcacaacagcagcgatctcaggatcagtcacgatcccgttgatcttgtcagtgaactcttgggtcgccagacttcgcataccagcgggcagtgcttggctcacctgtgtaacagtcagtagatcgttgctcatcttattctcggtttgcttctattacagagatcttgccagcttccagaatacctaacgcatgaatgccattgaagtcttcgccatatccacggtacagatgacccccatcgcgcagttcaactacaactacaacatgcttcgcatcgaagtgaccagactcaatagagtcagccagattacgtaatgcctgtggtgcgttagcaccaaaggctttcttcctaatcggtgtcaccttgtccatgacttactctccctcaccagccagctcaagacgcttatccaagatagcgaggtaggacttcatcacactggcttgagcattcagcaacatctgcccatcagtccccagctgcttgaacacaggcgtctgtaggaatgctgacagcttgtggaatcgaccagccaactcattcctttcatgggtcagacgggtcaggaaattaccttgttccaacttaagcttgtctgccagacgccatccgaggaactgccagcagttgttgatggctcgctcctttgcatacttctcacccttttcctggtcgtagttctcgatgctcacgcaagccgaggaaccctcgatggtgaagtcattgtccatcgtcagttgacagatggtcgtcttgccgtcaggcagtagggtgtacgactccttcttaatagaggcgtggatttcttcgatggtcactttcggtgcgttgctcatacttatctctatcctatttaggttggggtgtaagtcttttcgaagacgctcttcggagaccaagagatgtacccggtatgggctggatgattccagctgccaccgtcttcgtattcgacaaggtagcctggatcatcaggattctcgttgtcaggcagcgtccagttccgataggtgttgtagtcacctcgtgtcataggccatgccttgaggtacttcgtaccgacatgccgaacaccagcaccaaggtcaatcatgtctttctcctatttacacttgaacaaacaaagccacagatatcagcaggctgctgagaccgaaggaaccccacatcacagccttggctcgtagctcccagagcatcgccttgtggtgatcctgctccattacctgagccgttctgtaatcctgatgctccatcctcgtaccctcttgctttcgtgtgaggctagactatagactgtctatagatagctgacaagactatccccaataccgagaaggatgggggtacgggcctcctatgattagtccttatgcttcgcataagtgactaaaaataaaggggaaaaagaactacacaactggaaccaagggagctatagtccacccacaccaagggtgctgctgtcgtcttggttggcgttgagctgtcgatgtgggttgccgtgtcgcggactttctctaccctactggtgtgtggggatataactaccagagctgttgtcttgttgcgtacctccgaccacagacgaccgtggatctaacgggaagctagccgctccctagtagcaagggcttcagtagctgccgatcagctagagtcactatgacaatcgaggccacctgttagcgcaggtggcttttttattgcctactcttctacctcaaacttatctcgcatatagagaactctcccactattatttttaggagagagttactccaacttatgttcagtagtaggaaccttctgcaatattttttattgacagtccattgcacttttatgtccacacacttccacacacacaaactacccccccggtatgttcacactcgtggtctgcacccaccccatgtcttacacactgatgctccgcatcctatggatctattgatctctgctactcatcttctttctttggttcagcactcacgctgttccttcatcactactacctatcggagatacaaatgaccgctcaagctaatactcgcgtcactctggctgccatcctcggcactgtcaccactgctacttccactgtcaccaataccttcgatgccctgaacaagggtatcggtatgctcaataccactgtcaacgatgctgcttaccgtcaggaaaagcgctccaagactgatcgtgctctctacgtcaagaacctcatccgggatacttcccaacaggaatctctggctaacgctcgcgtcaaagaattcctcaagtccaatcccgatgctgctgctcactatcaagctaccttcgacgaactcactgaactcctgaaggactaacaaaagcagatccacccttcggggtggatctttttgtactgatagaccattcagtagatagaccatcgtctatcgatagtcctatagagattggatgagtggagaagtgtcagagcactgacacttgttctacttccccaactcctacatcccatctctctagcattatcccctaaacattccctataccctggagcatctcaatgcgtaacatcgatggcaatatctggatcaacgaagttgaagatgactactacaaagtaggctactacttcaccgatgagaacgatgatttcattggtcctttcatctcagctgatgctgctcttaaagcagctattgcttatgttcttacccttggctaaacataaataggagagaactcatgttcggtagctttgagtgtcaccaatccaaacctttcgaccttcgtcgtgaacgtcgtcaaatgtaccgctatcacaagcggtaccgtcactccaaaaaggatctgtatgcctctggggtcatgcagtctgtccgtcaattcaacaaggtcatggctgctcagtacgaagcctatgaagctgaaaccggccaactctatgaatcatgagcctgctcgttcttacgatgtaggctgctacctctggggtggcaacttcagcctcactggcgctgaagctcgtgtcttacatgagcttctgcctcatctgaaccaaggaacgatggagtttgcttgcgtcaacatccaacgttctttcgactttgatatggagaataaccaatgctgaccgaccaagatctcaacttcgaacagaaaggctatgacgcctgggttgaactctgggcagaccagggctgtagccctcgtgctactgattgtcctgctcgttacatgcctgatggtcccaaccgtgatgcttacatcaagggttggaaccgtgctcgacgtgaaaacgaagagtaattcctcaacataaataggagatagatctcatgcctcgtttgcatcacagccagatcgaagatctcttggctgaagaccacacgtgtcctgattgcatgctggatagagctgactgcgtgtgcatgtctgatgcatacgatgatgtcttctgtttccctgactacgagcctgaagaaacttggctcgaacccgatcatcctgaattttactgaacctaactaggtgatagctcatgatcgacatcagcgtctccatgcccaagaagtgcttcaactattccctgggccatgcccctttcgaagtcaacgtacacgtcagctatgacgtggttggctgtgtccgtggcaaagagggtctggtcgtcatcctgacgactgaccatcgtgtgctcactccgtggatctacctcaaggcttggtggttggtgtctatgcacctcatcaagtactaccggtgaagccgtcatcctttggctttacagagttgcttatcgtattgatattccttgggatatcagtcgcagcagctctgttcgcctactacctctggaccctgttcaatgtctaaccgtctcgaccgttcgttgggcgtcaagcctgtggactatcacccgatgtccaagaaggctgctccgcagcccaagggattcaccctcaaggtgaagaccgtgatcatggtcatgctcatcgcaatcactgctgctgccctgtaccagtcctcgcactgcgtgcaaggtgttcgctgcgctgattgatgttcaacttttaagtcaactttcaactaccttctagagttaaataggaggtaggtgtagaacagctcacccacagctgattgctttttgtgggtatcaacccgttaacaattcctttcaaactcaactcaataggtatcaacatgtccgctcagatctccgaattcgaacgcaccttcggcaagaacagtgcaaccaacgaagaaaccaagtccaacgtcaccacgtcgaacgaccgtcagctgaagcccaaggcacagctgtggatcaacgtgggctacgaagtggattcccacgacaaggatggcaacgccgtcatcgagttcatcagcctgccgaccggtatccccgtcgataccatggacaagctgccggccaaccagcgtgatgcctacttccagaagaagcagcaggcgtccaacaagttgctggataccgtcatcgccatgggcaagacgttgcaaccgggcgaagagaaggtcatcggtgcacgtggcagcttgcagatccaggtccgccgtgtgaaggctgaagccgagatcgtcaacgaaggcgagaacagcctgatcgtcgatctggtgctgtaatcgaatcacccatgggccttctaacgagggtccatggagctgtctattcaatgtcactgggtaccaactaacctacacttgagtagatagctccatgcaatgggcatgaaccaaggaattcaacaaatggctatgaccaaagtacccaagtcctactacgcagcagctgagaagctgcgcattgcaggactgttcaacgttggcaaacctgcctacggcagtagtggcaagcgcttgaagtaacacatgagaggactcttcggagtcctctttcttttttcaactcacctaaatcctaaaagtaggatttagaggtatcttggtagaaagatacctatggtcttactcttacacaattcaaggtgaataggatgaagaaatatactaagtctgaagtgaagttgcttaagcaaatgctaaaacttctacgtctggcaaagcctgaagtcatgactgaaggttatatgacgaacagtcaagagaatttacggcgaggcttatgcggagcattacagcgagtattaaatagtggcaacggtcatataaacagatcactggttgatgcgtatcataaactgaaaaatttaatcaatagatcattgaatggtagattattgaatggtgccatctggtttgatgacgcttttaggaaattaaacgatggtcacttcaatgatgatcagattgcaatgtatcgtcatcaatggattgatcaattgatccgtgatatcgatgctgcaattaaatactccgaaggaaatactgatgaagcccaagatctacgctggcatcgggagtcgtgagactcctgataacgtgctggatgccatgtattccattggctacagcatggctgaacaaggctggggtctgcgctcaggtcatgcacctggggctgacactgccttcgaaaatggatgcattgcagctggtggcctaaaagagatcttcgtaccctggaagggtttcgagggcgctcctggcatgcatcctggctacaccgtacccaagttcgatgatcacctcatgtctcttgctgctcgcttccaccctgcgtgggagcgttgcaaggacggagccagaaagctgcatgcacggaacgtgtgtcagctcctgggacgtgatcccaagaacccattgatgacctcggtcgtcattggctggacacgtggagccaagggggaaggtggcaccggtcaagccttcaggattgcacggcacttcaacattcccatcttcgacctcgctgaccctgctcagtgggaccacctcgctaaatttgtggagaacttcaacaaatgaaatacatcgtcgctcttatcgcagtggcaatgatcatgttgatcgctgccttcgcaccacagctgatgcaactcgcctggggtctcctggccgtagtgctgatcctctttgctgccctggttctgaccggggtagcaatcctgctctggacactcacgcgcgtattgcgtgggtgatcccctaatcctgtgagactcctatgtcaactcgcgtattcgtattcggttcgaacgaaggtggcatccatggtgctggtgcagctcttactgcataccgcaaacatggtgctcgctggaactatggctatggccttcaagggtcatctttcgccattcccaccaaggaagccactgacggcaaagtcggtaagacattgcctctcgaacgtatcaatcaatacgttcagggctttcttgcgtttgctgctggccatcctgagcttgagttccaagtcacccggatcggctgcggccttgctgctctgagtgatactcagattgcacccatgttcaagggcgctacttcgaacgtcttgttcgatgaagcatggcgttactttctcggcgagaaatacaactactggggcacattctgatggagattgatggctggaatgaattcctggaagctcgtatgcgtgtaattcaatctgctcgtaaacaaggactcagtgaaattaaaactgctgagcttgtgaacatcacaagcatgacgcaagcattattactgatcgctcatgctgatcgactcaacaaggaatctcatggcaactaaaattgttcgatttgatcgagcttactttgttctacaaccactctgcatgcattacttccctacagggggtggtgccaaacattccgtaggacgaattcgagaagttagcttcaatagtattggtgaagttactcgcttcgagactccaactactgtttacgtacaggtgaagaatgactagcaaaaaagttacttatgctcttttcaatcatgcgactaacaggattgttgttgactttggcaacagcgatcgatcgcttgctgagtacatcgaacgatacaagaagcaacacggtaaagcgcccaacgcattaccggtcaagatcactaccgttacaacggtcgaatcccttcctaactaaggtgttagtcatgagccaagatgcaacgatgcgtgctcatcaacagaagctcgaagagctttactccaagaaccagctgatcccaagggtcaaagctgagttcaacaaacccatcttcattgatcacatgaagatgcataacgtccctgaagacttcggcctgaacctcttggttcaaatcgctctgcacaaacgtgctgacctcaagactctgatcggtctgctccgtccattcgcaaatcataatgcgcaagctgttgctgatctgctggatgtttgtatcaacattggactggtccactttgattctgatcgtgatcagttcattgtacgcttcgaagttcctgaagaagtgcagcaagaattggatcgtttccagttcccactgcccatggtgattgaacctcttgaggtcaagcacaacatgcagtctggctacgttaccaagcatggttccatcatcttgcgtaataatcaccacaacgatgatgtgtgtctcgaccacatcaatcgcctcaacaagatcgctttcaagatcgatgacgtggtgagccgtctagtcaagaaccagtggcgtaatctcgacaaaccaaaagaaggtgagtcgaaggaagagttccaaaaacgtgtccgtgctttccagaagtacgaccgtgttgctcacgatgtgctggggcttctgacccaggaaggcaacaagttctatctgactcacaagtacgacaaacgtggccgcacatactgtgttggctatcacgtcacctatcagggcgcaccttggaacaaggctgttatcgctctggtcaacgaagagatcactaccgatgaatgagtataggattcagaatacttacgaagcagcgaatctcattcgtcagctggttatcgacaaagttcaattcgctgtgctctatgacgataagtcgaaagagtacgtcatcaacgcaatcgagaaggaataatttatgtgcgaacaatgtgaccagatgggtattccccatggttctgctctgagctttggtgtgaccagcaatgatgtcatcatggctgtggtctcagtcaatgaagtgatcattgatcacacacccattggcccatgcaatgaagaaactctgcaacgcatggaacagttcatcaaagaaatccgtcagcacatgctgctggaatctgccgtaccaaccggcaaggttaattgagatggcaacagaacgtgtgcactttcgtctcatcgtaatgccatgttgtcagcacatgttttgcaatgtaaatcctcgttggccttcattttgtcctaactgtggaaaacatgttttccctgaagtacgtggtggtgcactgatcagtgatgacagtgctaccctcaaatacgacgaaacaaagaagccgtaatatctcactgaattctcaagacgcttaggagcagagaatgcaaaagttcaccggtaaacagtatctccaaattgatctggccaacaactttggcctagacaagaagacctgggacgaacgtctcagctggtttgctgagaatcagcacaacatcaatggcctcttgaaccaagcagatgaacctgcactcttcttcgctgggctgaaagcatgggactcgttcctacgtaaagagccgtctggctatatgatctcgctggatgctacgtcgtctggcttgcagatccttgcatgcctgacaggtgatcgtagtgcagccatgctgtgcaatgtgctggacttcagcgaagaagctgttgttcaacgtcgtgacggttacacagtcatctacgaagcaatgattgaaaacctcaaggctatcggcgtctacgctggtggtattgaacgtgatgactgcaagcaggcaatcatgactgctctctatggctctgaggctatgccaaagcaggtgttcggcgaaggcgtacagctgcgtgtgttctatcagaccatgaagcaatttgctcccggtgcatgggaactcaatgacttctttcgtcatggctgctggaatccagaagcttactccaatgactgggtgttgcctgacaacttccatgtccatgttaaggtcatggatactgtcaaagaagtagtgcagttccacaacaaaccctatgacactttctatcgtgtcaatcagcctatggaagaaggccgctcaatcggagccaatgtgactcacagtctcgatggcatgattgttcgtgagatggtgcgtcgttgtagctacgacatggatcaagtgatcaaggtcatcaatgcaatcgatgatcctcagctggaagccgagtctggccccaatgctgaaatggtcatcaagctgtgggatcactacgagaagtctggtttcctgagtgttcgcattctggattacctcgacagggacactgtgcactacgtcaacactgatgtcgtcatggacctgatccagactctgcctgacaagccgtttgaagttgtcgctgtgcatgactgcttcaggtgcttgcctaattatggcaatgacctgcgtcagcagtacaaccaaatcctcagcgacatcgctcgttctgacatgctgtctttcatcctcactcaactcctgggtgtgccgaccaagatcggcaaactggattcagacatgtggaaagaagttctacacgctgagtatgcattgtcctgataatctatatgggggctaccaatcggtggcccccaattctgatcagaaaggatagacaatgaatcaccaacgcctgcgttataacttcttcatcaataccctgggtcgcatcatctacgtcgtgcctgaaggcaaaaccggtggtccgaatgcccgcccaatcggcgatttcaagctcgaagagggtgaacaacgttccttcaaggaataccgcgaagacctgctgaatgagctggaagtggctctgcaaagcattccggatcaggactactcgacctacaccatcaagatcacctcttgggatggtcaggaagaagagatcctgccgaccaatccggtcaatgaaggtccccgcgaatctgacctgaagcctgctccgaccactcctgtgggccaagaacagctggaacatcaggaagaagaggaacagggcgaaaccgaagaagatgacgataaccggtaactgaaagaccgggtatcataaggggccgccatagtgcggcccctttgtcaatctccgtaggaaagtccaatgcccatgctgcaagtcgccttcaaacaggcaatccccaagatcgccctggtccaggccgacaatgctgccatccctggcggctatgtcgatgctggctccttcgatcatcccgatcctgtctaccctggttccactgtcctgtatcacggtgttcgtgatctcctgtacaagcgagctgagctggacatgggtatcgtcagcatccagcttgctgctggtgtggtggcgtcctatgtcactcaaatcgatgtcccctggggcaatcgtgacctacgtctcgatgacccgttgtacggtatggaccgcctgaatgctcgtgcatggccaccgcatgctgctgatacctctctgacgtacgcttcaagcgatccgtctgtgatcagcgtcagcgaggatggaaccatcattgcccacaaggccggtgctgtcatcctgaccatcaccgctcctggcagtgaaggcacccccaaactgaagcgtgagctgaccatcactgctggtggtttcagtgagaatccagccgaagaagaatcgcctgcttaattcgtttcttggatcaagcaaacgttgaaaagcccgcagaaatgcgggcttttttgttgggggagcgatagacaaagaagctcaagactgtccgaaccaactacccaaaccttcccacataccgttatagccctcagccatctcagacagagatgctggtgtccgtgccttgatcagacctaccgccttacctgctgtgtaagcagggatagcaaatggtaggctcaagccggccatcactgggctggactttgcccattcacgtgcaaacgctcgatgctccaacggagcaagctgagcttgccttggatcattcgctggaatatttgcccgaagattgagcaaatctgcatgccccatcttggtgtaatcaggttgctccattgtctaagccccggctcaagaagccgtcatcataatccaaaggatatcccaatgctcaagtggcttctcaaaagaaagaactccaatctggatgttctcagctatggcgtaatcacgtacctcttcggagctgaagtgattggacctattgcatacattctgctgatacttctcattgcagctttggttcaaattgctgaaatttggtacgaacggaattacgaagattaaggatttttcatgcgcccaagcaaagtatacaaacagaatgttcctactgtgtttgagcaattgatgagcattccttatgacaaatggttagtgatcactagaaccatggcagctggtggtcccagtcgtcagaaacgaatgcttcaagatctcaaaagcatggcacagctggccaatatcaaagtcactactattgaccctactacggatcagtacttagggactcaattcaaaattggtaagccaacccccaactcattaaagctctattcttaatagagaaatatcatgaaaaaagatcgtcgtaagacgatcattgagaagatagaaaaccggtgcgacattgttgacaccggctttcgtatcaacggcaaagcatctccttgtcatctatggacagggccgacatcaggcacaggtcgtggcgggggctatggccgtatgtgtctcgatggtcagactgtagctgtacacatcgtcagctacactcactacttcgggtatatcccgagcaaaaaacaaatcgaccatctctgcaatcaacgtgcatgctgcaatccgcagcacttggagttggtcactcatctacaaaaccaaaggcgacgtgacaaacgagccaaggagaccacatgaacactgaagagaatgacgtcttaggttttcgtgcggatggaactcctatccgtaaagccaaacctgggttcctaacgactgctgcattcatcatgtgcagtcattgcaataaagcaatcagttcaagcggcgggccatcttatggtgcagtctgcattagctgtgctcagtgcaatcattcgcaagaatcagaggaatcttttgaatgagtaaaacaatctatctcgatggcacagagactctgatctacacacgttcactcatcgaaaataattaccgtccaaactcgatggtcagtttagatgaaatggaagttgtcgaatgtattagaactgcttgtctttacccagggcagttttgttctatcaatttctacacaccaaaagatccctacaaacgagaagctttagctagaaaatttctagctgcactcgatcttagggaacatcattgttacgaattacgtgttcatccttatcgtatgagtttgatgatcagaaatcatcgtcgaaatgaccaattgcaatatcattatccagtagaggcacaaatcccatggttgaaatccactccgtaaatagcagacagctcggatcaatgatccagcaatgtctggaagcaggcgtagtacctatgatccatggttcccctggcatcggtaagtctgctgtgacgcatgcaatcagcaagcgtaacaatctcaagatgatcgatcatcgtctgagcactgctgctccggaagatcaaactggcctgccatttcgttctgaagatggctttgcccgtttctctcctttcgctgatctgtttccgctggaagcaactccattgcccaatgggtatgatggctggctgctgttccttgatgaactaaattctgcttccaaagcagtcatggcatctgcctacaagctcattctggatcgcatgacaggtcagcataagctcaacgagcgttgcatgatcgtcggtgcaggcaatctcaagactgaccgtgcgatcaccaatgacatcggtactgcattgcagagccgtatggttcatctcgaaatgcgagtagatcacaagatctggatggaagacgtagcactgactcagaagtacgatgagcgtatcgtcggcttcctgagcatgttccctgaccgtctcatggacttccgtcctgatcacaatgaccgcaccttctgctgcccacgtacgtgggacttcatgaatcgtcttctgtacgatcccgtgaatggaaagcctcgtgaagtgctggacagcgctgctgctctgtacgcaggtaccatcacctctggtgtggctgtggagttcatctcttactgccgaaacgcagctgatctggtcaacatctctgaggtgttggctgatccactgaagtgtcgaattcctgacacggcagctgtacgctgggctacgacaacccatctgctcaatcgagtcacgaacgataatctgggagatgtgctgaagtacatcgagcgtatggacgcaagcttcaaaatcatgtttgtccgtgcactcgtgattcgtaatccactggttgtcactcgaccggaatatgcaatgttcctgtccaagatgaccaaccttctcaatagctgagccaaggaggctgtatggcattctctgccgtcgaacctaacaagcataatctgacacatctgaatcatcagatggataaggccaagaccaaaatcttcctcgggaagcatagtggtttctttggctcgttgctgtgcagcctcgacttcatctggtctgaagatgtacctactgccgcaacagatggtatccgtctgtggtggaatccagaatggtttgcaaagcacagcatcgaacagatgtcagtcgtactgcgacatgagcttgatcatgtcgctcgcttgcatgccattcgtcgtggtactcgtgatcccaagacatggaattatgcatgcgactatcgcatcaacaatgatctggtcaacgatggattctccttcaaaggactgaagccattgctggataagcagtatgatcaaactggcgtgcttgcttcagaagaagagatctatgatcttctactgcaacagagcctcaaccagaatggctcatggggcagcggtgacgttgacctagaagaagcattcaatcttcctgtcgaagaacaagctcgtgccatcaacattgtcggtagtgctatcgcagctgctagtgcagcaggcgaaggcattcctggcgatgtcacaaaggtcatggatcaattccttaaccctgtcattcaatggcagatcgttttgatgaagttcttcactgatcaaatcgatactgactacagcatgcgtcgtcccaatcgtcgtcatgacgacatctatctaccatcgctttgcgatgaagatgatggccgtctggaatcactactgtatttccaagacgtttctggttccatcactgatgcagactcccaacgcttcaactctgagttgaagtatgtctgggaagtactcaaacccaagaaagtaaccatcgcgcaattcagtactgagatcaccaaggtcgatgtactggttgaagaggatcgattcgactggatcgaaacctatggcggtggtggtacatcactcgttcctgtgcgcgagatgatcctgaaggaaaagcccactgcggctgttatcttcagcgatcttgaatgtccaatcatggactgcacaggcatcacttgcccgatcatctgggccacgattcgtaatcgtggagccaaggtggaaaagggtcaaatcatccacatccgctaaaggaaattgcaatgtccattcgttctcgtatcgctggtatcgcctctgccgttggtgccaccacgttggcagctaagctggctggggagcctgttattcaggcacaagaacctgctggagttctatctcagcctgaagtgaagcgtcttccgcgaaccaaagaaagctggtatcagcgttgggtgcgtgagcgtcctcggcgtctgcgttattacgcaagctacaaaggcggaaagcatcgtcgtggcgttcctgcgcatatccagcagcagtatcagattgatgctgaagcgaagcgtggtcgtaagcgagtgaagtgtgctcgtgatcattcgctggctacctacaacaatccttgcttgcaggactaaacaagccatgatcatcaacagccacgtcctgctgagcaaggcacctatcaaggacatgttcgctacgaagcagtctaatggtgatgtcagcttcggcatgtccgaggctggatatgacattcgtatcaagcaagatgtgtgttttacctcatggcaccctaagttcaaacgctttcagcttgcatctgcaatcgaagaatttcagatgccagatgatctggtgggcattgtccatgacaagtccacttgggcacgtcgtggactgtccgtcttcaacacggtgattgaaccgggctggaaaggattcctgactttggaacttgtctaccatggtcaaggggacttagttatccctgctggttcaggtattgcccaagtggtgttccacgagactgctgtagcttccgcatacaatgggaagtaccagaaccaagaggatatgcccgttggaccacgacaagcctgaaatcgactacagcaaataccctgagccgcctaggccaaaagtgcctacgcatccgctcagggtgtttactgaacgaccgcctagggaacatcttcccgaacctgtgaaccgttggcacaaaaacattactcgatctaatcgagcaaggtgatctatgtcagtacccctctgtcttgcttgtagcaaagaaaatccttgggtattggctagcagtctatacacagaaatctgtgctcaatgtgtagagtcagaccctcgcattgatataaatccagagactaatgcttacgcattattcgggtattgccagggtggttgtgatagacgtggaccagtcaactatggcagacatgaaacagaattcatgtactactgcaatggatctttccactgcataccttagctctttccctgggttcatcccatcaatcaaacatggagaaatacatggcaactgccaagaaagtcgcatcgaagaagactgccaaaaaggctgtcaagaagaccgctaccaagcgtgcctacaatcgcaagcccaaggttgctctggaagaagcaggcattgtggaagatgctctgaatcagcaatctgatgtcaaagctgacactgcatgccaagctgctgtgcaggacactgctgttcctgtcgttcaactgaccgactacagtctgtgggatctgcgtgcactgccgaaggtgatccgcattctgttcctgttggaactggaatcgttgggctatctgttgcagcctgatctgattgttccgagccaaagttcggtcatctgcaatactgacctgatcgaaatcatcaagttgaaccacaacaacaagctgatcaatttcgctcaattcggtgagttggaactggatcacggtgtgatcgcagagccgacctatctggaaagccgtctggacattttcaatgtccgtacttcgcgggctgctccaaccgagatcaccctgcaaggcgaacgtttcgttcgcatctgaagttgaaacggtgtcccaggcccatgaacctggggtatgtcctctgggaggactgtatgaggccgtgaggctctaagaccatgcagacaggctccgtcctggcagagggtgaaaacccctcacctactgagagcattgagaagtccgcttagagcttgttcaatacgctccgctctggttgcaacgctgatcgtatgcagcttgaactaaccggacaattcgaacatccacaacgcatgttgccgaaggctgattgcggcggacttctgagtgcttttaccccaatcaacaattgtggagaacagtatggcaactcgtatgcatattgttgtttcagacgacttgaaaaagcgtcttgataaaatatctgaagaaaacgaaagtacttcttcagagacacttcgtaaagctattgttcttttttgcgaagcacacgaacgtaagaaacgttacagcaattcaaagctcgggttcttcaacgaagaaactcgcgtatttgccgaaatcattaacctctgaggtaatcatgtctgaattcaataagttcggtgcagctgttgctgcacgcttcgccctgatgtgctcattcggtgagctgtatcgcacgactgcaagtgctgatgaactctgggatctgtatttggcttccttccctgaaggcaccaatccgatctttcgtgaacgtactgagcatgatggttcctatgacaggaacttcatcaagcggcttggcaacgttgttgctatcgatccgagcaacgatcaagttgtctcactgtggaacagtctggaaaatcttccatatccctatgatgtggtagctcaaaagatggctgatcatgttggtcgccacgagattacaaatctcttccgaaccaaggagctggatgcaggccataagccgaacttcgagctgatcgatggtcgtcagcatcagtggacacacttctatgttcgtctgcccaacttcgtcatcactcgtgatgcaggtgctgctatcggtcaacgtgcaacgaatgtctctgtgatgttccgtagcctgactgaaatcaaccagagtgctatcgtcgatgttctggatctgatcgagcagaatgcgctgtatcgtggtgaagaacacaagcctgctctgctggcatttcagaaagcacagaataactttctgatgactctggaaggcaagcacaacacgtggctgtggaagaacagcactaacaatgtgctgatgatcaagaacactgctatcggcactctgctggtagatctgtctgatggcatgccattggatcaggcagtgaagtcgttcgagtcgaaagtggctcctgccaactacaagcgcacgtctgcactgatcaccccggctatggtcacaaatgccatggcaaagatcgaagaactgggctatgccaatagcctatatcgtcgtcatgctgtgctggccgatatcaatgtcaatgacattgaatgggctgatgcttcagccaaaaatgtcatggctggttcgatcggtaatgtgctaatgcaagctgctgtcaagaaggctcccaagactgacactctggaagaaatcaacatccgtgagttcatgtctacagtacttccgaagaccacttcaatggaactgtttgtcagcaatgctctgacccagaacctgatcaatatcactgcaccggaagatgcagatgctccgtcaatgttcaagtgggacaatgcctttggctggtcctacaagggcaatgtgactgactcgatcaaggaacgtgtcaaggcagctggtggcaatgtcaaagcagaccttcgtgtctcgctggcatggcacaacagtgacgatctcgatctgcactgtgtgacccctgatcgtgaacacatcaacttcagccacaaggctggcgtgcttgatgtcgatatgaatggtccatatcaaaaggatgatcgtaatcctgttgagaacatggccttcatgcgtcctcaggacggtgtttacaccttcagcgtcgatcagtactcagctcgtagcaacaaccaaactcatccgggtttcacgttgcaagtcgagtgtggcggtgaactccatgagttgacctatcagcctgcaatgcgtagtcgtgcaatggcctgcatctctcttgagatgaagggcggtgtcatcaaagaactgaaggttctgaatgacaagttgattcaccagggacgttcgcagaaggtcaatggtgtcaacactgagtcctttgtccgggtctcgaccatgatgttctctccgaactactggggcgatcaagccattggcaacaagcattacatcttcctgctggaaggtgcacaaactgatgaacctgttcgtggtatctacaacgagttcctcaagtcacatctcgaagcacaccgtaaggtgttcgaagtgctgggaaccaagacggtgattcagccgcagggtgaacagctggccggtgtcggcttcagctctactgttcgtaattcggcactgatcaaagtgtcgggtccaaccatcaacaagacctacaaggtcatgttctaaggaatcaacatgtctgagaaaaacattttcgaggaagccactcgtgctgccgctcgattcccttcgccggttggtgatctctcaaccgagcaactctggtcgctgcccttgacttcgctcaagggtgccaacctcaatgacatcgctgtgaccatcaaccgtgagttgaaggcacagggtgaagagtccttcgtggacaccaagcccaatgcgaagtcggctctcctggctctgaagctggatgtgctcaagcacatcatcgctgtgaaacaggctgagaacgtcgccaagctcgacgctcaacgtcgtgcagcagagatcaccaagatcgaagagatcctcgtgtcgaagcagacagacgccttggcgtcgagttctgtcgaagacctggaaaagcgactgacagaactgcgcaagtaataccgttttatggattacctaggtgtgcaacagcggaacgcttggacaatagctatgtccgggttaggtcattcgagcgggtcggcccgtaccaagaagctgccaagacacttaccgcaccaccgtccatgggggtgagaatgtgaaggatgaaagcggccttcactaggtaatccgccatatgtaagggggccactcaatagggagtggccccatgccaatctgatgagtccgttaggacgaaacacactctgtgtgtaattggctgtttgagatgaaagggcgctaccctggaatcaatattgttcagcccgttgtcgatgcgatcatcggctaattcagcactgaggatgtgctgcacctgttcagtgccctcgcaaggtacgttgaaccaggggacgcaagtaacccttagagacgtgtataaccggaagtctaaatccggtgctgtgtcctaacccacagtgagttgataccaaatagagaagattaggctcgcttggttaagcactcgtagacttggcaactacatacacgtctcgccttcatatatttgaggtagcaccccacttgtgctcttgtacaagatagtctaaggttgctgccacaacgctttcgcgggatagttcagttggcagaacaccggactcataatccggatgtcgtcggttcgaatccgactcccgcaaccagctttacctgcctgtcgtgtcgtaagactctaagggcgtcgaactgcaagagctgattgtcattcgagaggagaggcaatccactagcagaggattttttgtaagactctgtgttgacgtgagaaacgctttggccgcagtacgataggcaggtaatctagtttcatgagggtgagtagctctggcgtggcacaggccatcaactagctggaagctcagtaacgccagggttgagttcctgacaccttcgccaatttcattgtgggatagctcagttggtagagcacagtcctgataagactgcggtcactggttcaagtccagttcctacaaccagtttcatgggcggactacggtagctccggtggggttcgactccctggccgtccaccaagtttgggtgggagtagtaggacacaagcgcgggaatttaccgtgcgtgatgctgcttccacccattagctctttgacaatggatcgggttatcagatgggcgctgaggcagactgtaaatctgccgtctccggactcgcttggttcgactccaagctgatccaccagtcaatcgtttcctgggttgttccgccgtatggacggcaagcggtcttgaacaccgtggcatccgaaaggttgagggttcgattccttaacaacccgccatccacttcatcgcaagcactctcgtaagtaggcacgcaggccatcgaccttcggggcagtaccgcgaacgacgaaaacgagagtgctctcgatggagagacaggatagcttcaatgcttcgatggttgaattccatccagccgagggaaatttaaacgggtaactcccgccttggttgccagcttggggaagcgccagttttaggacaagtgacagagtggtcgaatgtagctggttgctaaccagcagacttctcaagaggtccgtaggttcgaatcctaccttgtccgccatagcttcatgggattagcacagcttggtagtgcgtctgctttgggagcagaaggtcacaggttcgaatcctgtatcccgtaccatgttcaactattgctggtggaccagcataggcactcagcgaacctgtactgccgagtcttggtggaactaagacatagttgttcgaactgctaccacatgtacttcccctcgccgacaggtcagacacggggagactaccgggccaagggcaaatcccttggcatgaaccaagaggatgaaaaagtcttcttaggcgtgtggatagcagcacctattcaggggaatcgtacagcggttagtacctcagcctttgacgctgataaccttggttcgaatccaagttccccttccaatgctttttatggtgtgggtgcgatcagagcaatctgatggcttccataatgcaactacgtctacgtttcgtaggctagtgagcttctgtgcggcattagtacctggctgttgcagcctcggaaaacctgtcaagtacagcagtaggtaatcaaccctacgcccacgccgccatctatgccgtctttagaccttatagaagtgaagaacttcagctggggacggctccaattcgatccttccatgggtcgtaccttaaggtctggatggttatacctttcaaggacggacctttataaatgtctaccaaaggtagcctgtcttccgctatagaagaagatagttcgttgtgagtacagtttctttaaagtgaactcaccgtgcatacagttgcaggatttcaaacacgtaaactaccagaacctgacagatgtagtctctaaggctatatctgaagctgcacctagccgattctgtcggtcggtgaagaagcgaacatgtctgtattctggttcgacagccagtctaagaacagactcttacttcatggtgcagccccagatgttgcttttaagcaatccgacactttgttaacgagtctagcactcggcaaacggtgtccctgcatatgggtaagcaggcagatgtagttacagggcactcggcttatatagcgcactccctggaagctgcatctgggaattcttccgcaagttagtgactgacggtgtagctatcgcgctgccgttaaaacattgtgagacctgagagggaggtgatatcaccctagacggtcggcgaatattagcctgatcagctaaaaagctaggagaatttccagatgttgcttcaacaagaagagcgtatggtctatcaaccatgacgcatagatgcttggcttacctaagcaacatcgtctacagacccactatgctgagtgctcaacagagagccatagcttccgaatgtgattcccctgtcacgctagaagctatgcggattcgcaattcggctcagctcccccttgaaagctcagacattcgtctgggcttttattttttggagatcatcatgagcgataccttcgaccatgaagctgaagcgtgggatgatcattgtcttggggaaagacctgatgatgatctcccagcattcatgcgtcgccgcagggaaccaagacgggaatatgtcccgtatgaaagacctgccccaacgtatcaagctttccctctgattcgtgaagtacacgagacagagaaggctcatcttgttgtgttcactttcgatgacgaagacatcgagaggtggcttcccaaatcacaatgccgcattccatacgctgacctgatcgagatatcgacatggctcgtaggtcgaataaaggatgagatcaatgcccgataacaaaaaatcaaattcatgcttgcccataaccgataacctgattcgtgaaatatttatccgcaacgggtttgtcatcaaagacggtcacaaggatttgaagccatatgtgtatgcagccgcccgcgaacttttagacgccgcccgccagcacgcgggacagtacagcgtcaagacggaatccggcgaacttccatgcagccttgcagtggcttcagaatgggagaagcgcgaggaatacatcgcatcgctggaggcccgccagccggtaggggtggagcctgtggcgaaggtgcgacaggatggcggaaacgggccggttgtgtggtactacccacatacgttctatgggaccaatattccagacggcgctgacttattccttggcccgcctgctgctgtgccgattgatgggatcactgccgattgggtcattggctacttaggtagtggtgagtccaagctgacgcataaggcgattaggtacgcattttcagagtttgcagcactcgccacccaacccaagccggcagcggcgaaggaaagctcctaatgatccaagagctattgcttcttctgggaatcatcaaacgtcgtaacgtaaacaggtattacagaaatggctagacccaaacgctctgattggtcatatgacatgaccaaagctcctcatgataaatacatcgtggtcgaagggaagactgacatcaacaaaagctcaagcgactttgttgctatttggagtgatgtgtacaacacattcatttccaagactggctgggtcattgttggagtcaatcgttgggctgaaatcctatgagtgatgaagccaacattgctttcaaaaactggcttgctgcgaagcgagctgccaatccaaagtttgctaagaatgctgatctgaattctgctgggaaccatgccattgaatatgtcatgcgactggcgttctatgcaggagtcgaggcaaccattcaactactcggagacgctcatgtcgaagacgaagagtgacttgatgagtgatccactcatcaccaatgaagcactggctctagctgtacgtgaagaagctatggtcaaagatatggaccatattttcgaacgtgcgtctatcatcgcagcagagcaggagcttgaaaatgaaatccgttgatcaaccaatcatcatcgaagactcaatcagtccagaaggcattcgcctgacgacattccagctccgttactggcgtccgattcattcggaattgatgacacatcgtgtcttcagtcgtaacgccggtagcagccgtgcacgaccatccaaggcaatcattgaacaagtccgcactgacccctggggtccacttcattggggagccaatcagcccggcatgcaagctgatagcgaactagacgaagaaacgatacagcgagcaaagaaaatgtggttgtttggggcagaacgagcagcaatgactgctgaagctctgctaggcattaatgcccataagcagatcgtcaatcgtttgctggaaccattcacctacatcgatgtcgttgtgacagcaactgactttgccaactggtacgcattgcgcgatcacacagatgctcagcctgagatccgcaggcttgctgaattgatgaagcaagcgcatttggaaagcattcccaagctacttcagccgggtgaatggcatctaccatacatcagcaaagaagactgggttgaagcagcataccgaacgatcaatatcgtaggtactttgagcttgctcaagaaagcatctgctgctcgctgcgctcgtgtcagttacaaactgttcgacggcagcaaagccaactttactgatgatctcgaactgttcgatcgtctacttgtcagtgagccactgcatgccagccctgctgagcatcaggcaacgcctgatacttacaaaaagcataactggcgaaccggtgaatcacctcattgggtcaacccacggttgcatggaaatttccgtgggtggaatcaacatcgcaagatgctacctaacgaatacgtcccaggctaagtcatgaagatcgacaacattgattttatggaattctcagtcaacggtaggtcacacaccgaagctgtagagtcatttgcagaaatggtagaacagtacaaaaaagactgtgctagtgcataccactttgctatgaaccctgatccagaaattcaatggggtttgattcaagtaggctgtgctcttgcaaatctcacagtgataccttttgaacaagtgagcgataagcgttcctggttcatgcgttatcgaatcaagcgaagcgacgatagtcccattgaggactatttgtttctgagagctgatgactacatgcggttcctatagaccctttgtttgggttaaacccccttcgcagtaatgcgttgggggttcttttttacatcacatttttggaggttatagtggaagtcgctaacactgaccgtaaggtcaacgctgcactcattggtagtgccggtgaatctcatgcggtacaggttgcgggcactcgtgaattcatcgagatgctatcttcgaatctgtactctcgacccaaggaagccatgatccgtgaggttctctgcaatgcagatgacgctcataaagaagctggctacacaggtccaatcgaaatcgtcatcgaagatgacaacacactgatcatccgtgatcgtggtctgggtattccccacgacaagatgcatctgatctacggtacctacggtggatcaaccaagaagaaagacagcatggccactggtggcttcggtcttggctgtaagtccccatggtcctacacagatgcattcaccgtatccaactgccatgcaggaaccaagacgatcaacacgatgctgcgagtaagcaacgatcatggtggtctacctgcgatcattccgattgccaacttccctactgatgaaacaggactggaagtccgcattgatattaaggcaagcgatcttcgtgagatccgtagtctgatcatcaatgcagtccaccgtggcggcatgaatgcaactctaaatggtgatccattggagcgcatcaactatcccgaagatcagaagtacgtgttcgtggagaacagtcaccttggtcatcagatcatggtgaagtatggtgctgtgctctatccagttgatgagcaagatgtctatcgtgaagcctacaagctgatcactgagtacttgagccataaccagacactgatcctcttggctccagcggatagtttgatcatctctcctaaccgagaaaacgtttcgtatcttgacaagactcgtaagcagctgtacttgctgctgcgtgacttcatggaagagatcaacaagcgtgcagaaccttatgcacgcgaactgatcaacagaacgaatgttgctgaaatcaaacactcaaagcttagctggttgcgatatctaaataggattgattggattagtcataacttcatcaatcatggcaagtccaatctcgatgtgtttggtcgagtgattcactcgatgctgacgcacagctatccgcatcacttgcataaaaccagtctgaaacaacgcttcaaactcagtcagcaatacgtcagtccaggctgggaacaaatgatgcttttgaagttgagaactgaagcactcaaaaattcaagctcacacagcaacagctttttcaagcaagctgtgtttcgtttcttgagcttgactcgacgtctcaacatcagccctagtcaaattcgtttcggcgagcgtgagcaaatgtacatgcgagggccagagtacaacaacggtcgctttactagcatgtctgttcctattcaagccttcagatggaagtctaacaaagacttgaatgagcaagctatttggctcagacctgctgtagtgatcagtcacaccatcaaaggaattgatgagtcaaacgtacgtaattcccacgaagcattctttgctatcgtggtgcctcgtacaggcagtacgcattgcagcatcgtagatctgattgcttactttaccaaagctggtttcactgttaaggatttgactcctgatcagaagcttgttgctaaggttaaaaatgatgcaaaggttatcaagtacccggtgcttggtacattgcgtcgtatcaaagcaaccacttacggcgataagtacattctggaaaaagcattgtctttgaatcttgaagacactggctgcgagaagcctttggcttacatgaagattgcttcacgttctggtagctatgtcacatcgccactaggcatgagagacgatgactttcatgtcttccaaccactgctaccagatgacactgcaattgttacgaccgaagctgaagtcaagaagctgaagaagttaggtgcagtagactatcgtgaagtgatttacaatgtagttgctgagatggtcagtgatccaaaggttcgacaagcgtatgcttggcgtccaaaggatagtggtcacaatcaacatagccgctcgatatacaagacaatgttctatctcaaaagtgcttggtatcgggaaaatttccgcttgccagaaatcagctatgacaaggagatgaaacataagctcagtttgctttatgcatttgattcggctgctcattggttgttcgataaggactcaccacttgctgataaaaagaacatagcaaagcttttgttgaaaattcgtaccagtaaagaaccatggaaggtgaagtacatgtacgacttcattgagaagaacccaatgttccagggttctgtcaatgtcgatgaaatcttggacctgcaatcaaacacaactgacaccaagcttcttacgaagctggatcagatcctcaaaatcgttatggagtaattatgaaaattacagtcgtagcagccatcctgaaggatgacagccttacgcttgttaccaatgaaggcaagtatcacaaacttgctcaaggtgacaatcgtctccgccctattctcgacttggttctgccggaagtacaagccggccgttctatcgaagtggatctcgctggtgctatcaccaacgcttatgaagacttcgaaaagaagtcgaatggcgtgatcaagttcttccgcgttgctcgcaatgcattgaagaaatggttcggcgacaacagccttgctgtttcggatggtacctatggaaccattccggacacgccggctgaagtcgatgagatcgttcagaagctggaagctgagccagagactcgtgagcagactctggaagagatcatcgccaattcgaagcctgtgactggtctggtgtttaacaccggtacccaagacaagcagctacctcagcatgagactctcattgctgttgtggatggcaaagagatcattccgaatgcacagcatctccatgctcaggtggctcatgccagcaagctgggtagccctgctgcattcgagaacttcgctcgtctggtgacggcagtgaagcgtcagcactcgatggatgatctggttgctttcatcagcaagcttgatacacctctgactgatgaaggttacgtcttggcttacaaaaacctgtcagctacttctgaagttggtgtgtatgtcgatccgtacaccaggaaggtcaagcagcgtgtgggtactcgtgtctgcatgagcgaatctttggtcgatcccaatcgtggtcaggactgttccaacggtctgcacgttgccagccggtcttacctgggtagctacagcggcagtggtggtacgttcttgattcgtatcaaacccagcgatgtcattgctgtgccgaagtacaacacgaacaaaatgcgcgtctgtgcttacgaaatcttgggtcgtctgagcactgaagatgctcaagctgtgtgcagcaaccgtccaatgcaaactgacgaaggcaagcgcctgctggccgcagcaatctccggcaagacagtggcaatcaccaaccaagtcgagatcactgcatctcacggtggcggctgtgtttacactcagctcggcgaaagcaatccaggtcgtgtgttcgaacgagattcgttggaagatctgggcatggtcgatcctatcgatccagatgcaccttccgatcacacggctgcacctgtggcagtcgaggaagtcgccgaagtaatcgagacgaccaacctgactcgtaaggaagcagctgctgtgctgcatgctgcatgggccaagctggtcattgatggagcagatgacatcctgacagcagaagcctacaggcagctggtggacttcaagcagcgaaccaaggtctcttgggcaaagctgggcattccgcatcaaggcaacaccccagttgctgacttcgttcctcctgaagttacacctgccaaggttgctgagcagttcaatcaagcagcagcaccggaagaacgtgacgaagaggcagatgccgaaaaactgaatgatctgttcatgaagttcaacgtagcagatgctggcggcaaatctgagtacgaagctggaaccgagctgatcaagctgttcaaggactatggctttgcctgggacgaagacggtgacaacatgcttctcgacttcgacgaagcagacctgggtagcgtcagtttcaccgtggctaactatgaacaggctcagcttcgtgaaaagttggcaccgtctgagaagccttctaaggccaatgaaggtgcagctgccactaccgtaccggctgatggtggaacgcctcgtcagcgtatccgggcgctgcttgccaagggtccactgaccgtaggcacggccaaggaaatcctggctatcaagaaggcagcaaagaagggttggtcagctcttggcgtcaacggtgaagagtcgtacgacatcgagcagcaggccactggtcagtaaggttcctaccaagacaccctcagttcaagttatactgagggtgtctcaatcacaggaaccaaggggatgagtaacgtccttcgtgtcaaccgcaaggctaccgatggcgatatcgttcgcttgaatgcctgcggattctctctcaagaccatcggccagatgctcggaatccatccgactactgtcaccatccgtcttcatgctctcggagttcctcctgcggatactcggcgatccttcatggaagccgttttcgcggggctggactctgcacagcaggagtggctggccgatcacctcaacgctggtgtatccgtcaaggactacatcaccaaactggttatcaacgcacatggacaacagcaacaatctgctggcaacactcaactggtttcggatagcgaagccgagtccgacgcagcgtgacatcattgtccagactggcgtgcactttgaagaagtgaccgaacatctggacactgtgacaggcaacgatgtggaaacatcactgctggtcatggaagcaaaggatgcactgaagcgtctggctgatcatatgaagagtgaaccaattcgctactcataccagccggaagatcatctcgaactactggacgctttgtgcgatcagaacgtcactggtgtaggcattgcttacatgctgggcttcgaattcaatggtgcaatgactgaagtcaatggctccaacttctccaagttcgtaaacggtgaagcaatctttaccgagcaaggtaagattgccaaggggccggacttcttccgccccgacctcggaccatatctgtaaagcaactaatgcatagcccctcaatagaggggctttctatttaacggagtgacccatggaaacacctcagcgcctacccctgaaccagggacagcaagccgctgctgacggcttcttcagcttcctgctgaatgatcagcaaaaagaattgatcatcagtggtccgggtggagtcggcaagacgttcaccatgggtcacatgatcgatgaagtcatgccgacctactacgacgcatgtgacttggcgaacatcaagcccaagtacaacgaagtcgtgatgacggcaaccaccaacaaagctgctgccgtattggcagaagctaccaatcgtccaacgcagactgtgcattcattctttgacctcactgtcaaagaaaactaccgcacgggtgaaacagaaatccagcgtaagcgtaactggatgatgaaagaaaagaagatcatcttcattgacgaatgttcaatgattgatcgtgagctgtatcgtgaaatccgagacggctcgctcaatagcaagatcgtctatgtcggtgatcacagccagctggctccgatcaaagaaccaatctcaccgatctacaatcagcgtctgccgttctacgagctgacgcagccgatgcgtacgaacaatcctcatctacaagcgctcaatcagcaactgcgtaacactgtggaaacgggaatctttcatcccatccacttggttcccggtgtgattgatcaatacaacggtagtcagatggaagaagctttccgtcaagagttcagccaacagactcgtgatgcacgtgtcatggcttacaccaatgcacgagtaattcagtacaacgattacattcgtggtcttcgtggaatcagtggtccatatcaaccgggtgaattgctagtctctaactcagctactcagctgggagatggcatggcattgtcagttgaagaagaagttgagctgatcacttctactacaactcctgcacctgtgcatctggatgatgatgcaaccatcgatgtttattacgtcgatctggaatctgcttacggctactatgcaaacgtcatggtgccagctgatcgtgatcactggaactcgttgatcaagtggtatgcacaacgtaaagactggaagaattatttccagctgaagaacatgtatgccgatctgcgtcctcgtgatgcatgcactgtgcacaaagcacaaggtggtacctacaagcatgcttacatcgatctggatgacatcagtcagtgccgcgatccaaaggtagcagcacgactgctgtatgtggctttcagccgagccaaggagagagtaatcgtctatggagatctggctgaaaagtttggtggactcgtgaggtgatgtatggctcgaaagacatcagtaccgccaacagtgatgttcagcgttgaagttcttgaagcattgcatgcaccagaagaacgccgtattgatcgtgagatatctgagatcaatcgactcaatggtgaaatcaaaaagatacctaacccaactggctatgcctacttgggtcaggtgtttacgacacaagagttcaaacgtattgctggcaaaaatggttggccacaactagacacgtctctttgggatcgtgctcatgatgtgcttgaagatcagaaagctgtgatggctcgcctagcagctgtacgtcagtacatagcactggtcctgaccacaagcatgactggtgaagatcgtcgtaatctgattcctgattacattgcttcattagccaatgcgacaatggacattgctcgtaccaaagatatcgaagaagtcttacctcgattcccaaagatcgaaaagcaatacagacttgttgaacaaacgatggctgtcctggcagcagggcaactgatctactaggagttgccatgcgctatctgacttatcaagagcacacacgaggatatccggtgtgcttcttggtacctgctatcgacaaggatgcaatcaagcgtgagtacatcacgccattcaacgttaaggaagaagacgtattagtactctcgttgcatcagagtactgaaaagaaaaaaactccagctgccgaaatgaaagagtacatccagaccatgctggctgaggtactcactgacagctatgtgcaatacattgttgtcaacgacagcgaatacttcaaggtactgacgaagagtcagtcctctgaagcaagcttgggatacgtcatggactgtgtatacggcccatggaaagtcatctacgtcccaagctttaaagcggtgttctatgatcctgtaaagatcagacacaagattgccatgggcatgaaagctttagttgatcatcgatcatctgagtacaaagcccctggttcagaaatcatcgagttcgaacactatccagaaaccaatgatgaaatccagttcgcactggaaaaattattggagatggattgtgacctcactgcggatatcgaagcattcgacttgaagcatgacaaagctggtatcggcacgatctcgtttgcctggaaccaacacgaaggtattgccttcttggtggattggaaacaactcagtacagagggaccaatctttggtgccaatgtaaagaatgatcatgtccgaggactgctggcagacttctttaggaagttccaaaagaccggtcgtaagatgatttggcacaacatcgctttcgatgcctacgtgctggtgtatcagttatttatggaacatctgatcgacacagcaggtttactcgatggcttgaaaatcatgctgaccaattggcatgacaccaagctgatcacctacctcgcaacaaatagctgtgcaggaaacaagcttggtctgaaagagcaagccttggagtactcaggcaactatgctgtcgagtcaatcaaagacatcacaagaattccaaagcataagttgctgaagtataaccttgtcgatagtctttccacttggttcgtattcaacaagtggtaccagaagatgatcgatgatgatcaactggatatttacgagaacctgtttcaacccagcattgtagacatcgttcaaatgcagttgactggtttacctgtcaacatgcaaacagtgcacaaagtcaaagtattgttagaagctgacgagctgaaagctcgtgatcagatcaacagtactcaagtgattaagcaatacaactatcgtcgtctcgaagcttacgttaagcgtaagaatgaagagtggaagaaaaaacgtacaacgattgctgagacacttgaggcaagcaaaacgaacgagaagatccgtgaggaaattacgttcaatcctgactcaccaaaccagttgcaagacttgttgttcaacatgctgggcttgcccgtcattgaactcaccaagactaagcaaccggcaacgggagccaagacgatcaaagcactcctgaatcacacgaaagatcctgacgtgttggagttcttgaacggcttgctggactttagctctgtcaacaaaatcctgaccagcttcatacctgcattgctcaatgcatcacaaggtccggatggttggcattacctgttcggtaatttcaatctaggtgggactgtctctgggcgtctgtccagtagcaatcctaacctgcaaaacttgcctgctaattcgaagtacgccaagtacatcaagatgtgcatcgaagcacccccaggctggctgttctgtggcctggactttgcatcactggaagaccgtatcagtgcactgacaaccaaagatccagagaaactgaaggtatataccgatggctacgatggacatgcaatgcgagcattcgcatattggggcgatcagatgcccggtgtggttaacactgtgcaaggcatcaatgccttggcagacaagaaacatccgtacttctatctccgtcaagcatccaaggctccgacctttgcactgacctacgcagggacattcaagaccctgatgaagaactgcggtttcaatgaagaggaagccaagaaaatcgaggccaacttcaagaagctctacgcagtttcgatccagtgggtcagccagaaacttgacgatgctagccgcaatggctacatcacagcagcctttgggctgcgtgtacgtacacccctactggctcaggtcatccgaggcaacagcaggacgcctcatgaggctgaggcagagggtaggacagcaggcaatgcccttgggcaaagctggtgtctgttgaatagccgagcctggaaggaattcatgggcaaggttcgtgactcagagtacaggctggatatccggccctgtgcccagattcacgatgcaggctatgccctgatccgagaggatctgggtgccgtggcctacgccaacaagcaccttgtagaggcagtacaatggcaagaccaccccgacatctggcatgatcaggttaagttgggtggagaactcgggatcttctaccccaactggacgaccgagatcacgattgccaatggggccaatgaggaagagattttctctaccgtcaacaaggcactggcggcgtaaccttccatcagggaaaagccatgtgcaactgcaattctcagactatctgcttcaagcgagggtctaccttcgctttcatgtttgaggttccagcagaagtaccagacggcttctttcgtaactggctccctaaagctcagttgcgaaagagccgatctgattcagaacgaggtttgattgcgaacctcgcctgctactggaacgacgatgtaaaggcacgacaagtcattgtccgccatcttgaaactgatcaattcccattgggtgaagctgagttggatatccgacttgagtcttccaacggtgaggcgattcacaccagcaccatcatcatcaaaatcgaacgaggcatcaccaatggctgacatcactcccaaggcgttcgacggtatgacgttgagccttgtcgctgtacctctgaagggtaatccaggcgagcagggtaaaggtctgcgtggtgatcctggcgatagcaattatcagctctggctgaaggctggcaataccggaagtctggaagacttcctgcttgccatgaaaggcgagaagggtgcagacggccaaggactgaccaatcgtggagattgggaagttggtctgtatcagccgggcgattacgtcttttctgctggtactcaaacggcgatctctatgtggatctaccgtggaagcgaagagttcatctcactggttccgccagatgaagacactgacaactggattgaatttgctgctgataccggcaagccaatcgagttgcgcaacaatggcgagaagatccaatggcgcatccaagatgcagctgagtggatcgatttgatttttgtatccgatctccgtggacctactggcctcaaaggagataagggtgacaaaggcgatgcaggtactggcttgaacaatcgtggtaactgggctgctggtacttaccagccgggcgactacgtattcgcagcgggtactgttgctgcaagctcaatgtggattctcagctctacgactgattacgtatccaacactgctcctgcaaatgatctgactcattggatcgagtttgctgctcctgccggaccggctggtgagcaaggtgatgatggactctcagtcaatctacgtaagacttccactgcaatccagtatcagcaaactggtggtccctggactgaccttgttccgctgagtgacatcaagggtgataagggcgaacaaggcattcaaggtgtaaagggagacactggtgtaactggtaagtctgcctatcaatctgcattggatggtggattcgttggaaccgaaattcaatggaatgcatccctgaaaggaaccaagggggatactggaacagccggcaagtctgcctaccagagtgctgtcgatagtggtttctctggtactgaagcacagtggactgcttcgcttaaaggagccaagggtgacaccggtactcaaggtattcagggtatccaaggcgtcaagggtgacaaaggagacaagggtgatactggccctgctgccagttataccgagggtacttacgctgcacgtccagcccctggtattgcaggtagtacctactacgctacggacattcgtgagacctatcgttccaatggaaccaactgggtacttgccagcactggtggtgttgtactcgcatcggttgctgttgaagcaagcggtctgtcaaatgctaatgagattccaatcaccagtcatgactttggcttgactccatttgcattggttccgaatgctccatcgctcatcttcacttgtgggcagcgtccatttattgtgacgctctcaggtacgatgcgtggtggtgaagccaatgcaacgtggtgcgtacagttggaaatcaacggtactgtctacacgcagcttctcgataaagacagcattgcagacaattggaaagcagtcgttcgttcgaccaaaccactgacgtttgctgtcggtactacgatcacctgtcgtattcgaggtgttgtgggcggaagcaccaatggtgctctgttcaccaacccagctgacccacttcagattgtggcgatgtccgtatgatcctgactcgatcagttctcaatgaagcactgcttgtggtgactcctacgttgccacagagtggtccacctgtcctcatggttcatggtgccgagggtgatcccaacggcgcctgggcgtggagtcagtacgacacacgcaccaaggtgccacgtggctgtctcgacgcagggcgtgtcatacacagccctgagttgggtggtaactacacctggggcaatgccacatgccaagcacgcatagatacagcctatgctcgcatgggcagccagaagatcgtggttgcctgtcagagcatgggtggtcctggtggcttgacttggactgcaaacaaccccactaaggtggcaggagtgatcctagtcattcctgtgctggacttagctagcattctgacaagcggttatgcatcagcattgaatgccgcctatagtggtggctacagtgatgcaacctacggggacttcagtcctgtcgttcgtgcacgtcgtggaacttttccagcagtaccaattcaactttggtatggaactactgactcactttgtttgcctcagtacgctgaagagttcggtgcactcaccggagcagagatgcatccacttgtgggtggacacgaagagagtgtagtgaacatggtcagtgcagctgaagtgacacgattcatcaaaaatctttgattcattttttctggtgtctaacaccaacaactggggagcgaatgctcccctttctacctctggagaacctgatggaaaagaaacatttttacgtgctctgtgctcaagtcgcttggcgtaccagcgaagattctgaagcactgagcgtgatgcctgtgaacgttgttgcatcgttcccatcgccatacattcgcaagttcaatctggcacaaatgaacgctcaggcaatcaacaacctgagccagatgatcggtgaacgtgtcaacccggatctcgtggccggtgtgaccatcatgaacatttcttctctgggctacatgaccgaagaagagttccatgctcaaccgactcagactcaggtcgagaaggaagttcgtactgtcgtgagtgaagcacaggatcagagcgagcgtgcctaatggcattcatccacgctactgaaatcttgcagatgagtgctgatactcttggtcagcgagcagctgatcgagatgtagttgaagaacggtcaatggctaaggtcgttgctctgttcaacatgaagcacgatctcaatctcaccgaagcacagggctggaacttcatggtcacactaaaggaagtccgctcactgatcggtgacacgttccgtccagatgattacatcgacaacatcagctacacagctcttgaagctgagtgtcgatctaagaagctgtaagcaaagtcgcagtcctttaccggggctgcggctctttttatttgacatagagccaacagtgaacaccatcaccaacagaacaggcatcccattgactcttgcagtctgggctgtccatgacgattacgacttcatctacgatgaaaactacatcagtgttaccacgctgatgaaacccattcgacagactgtactaggattccgaatcagtcctgaagagagacaacaacttgatgctgctgatctcatcagctcatcctggggatctgcccttcatggttctgtagagaacgcatggcgtaactatagaatcaatctgaagaaacttggctatcctcagtcagtgattgatcgtgtacgcatcaatccgaagccagaagaaattgcagcagaccctgacatcattgctatctacatggagcaacgtcgtagtcgtgttgtggctggttggactgtcggcggtaagttcgacttcgtaggcgaaggacaagtccaagacaacaagtctacaactgcctacacatggttctatggaaccaaggatgaggactacaagctccagctgagcatgtaccgcttcctcaacatggacatcatcactgaagaaaccggtcaagtgaacttcctgttcaccgactggaagaagtctgatgcccgatccaatccgaagtatccacagagtcgcttggaatcaaagacgattcctttgctctcaatcagtgagactgaaagctggataatcaatcgtctggctcagatcgacaagtaccgtgcaacacctgaaaaggaattgccacgctgtactgatgaagaattgtggcgctctgctccgcaatacaagtactactccgacccaactaaaacggacggacgttctaccaagaacttcgatacgctgcatgaagcgaatcagttctggaaggtagacaaagctggtaagggtattgtcaaaacaatcccaggccaagtgaagcgctgtgagtattgtggagtcttcaatctctgctcgcagaaagacgaatacttccccgaaggactaccaacatgatcgatctgtctgacgtacagcatcacatcacagtcgaagagattgtcgatgtcctgtgcaacaagactcaaaacactgaccgtggatttttccgtgcaaccgtcgtgttcttccttgcgaagatggcaagctgtcagcgtgccactgtcgttacgaaggatcgtggtgcattgcctgtcaacatgtacacccttgctctggccacttctggctacggtaaggggcactctgtaggcatcatggaaaacgagttgatgcaagcgttcaaagaacgtttcacactcgacaccatgccagtgatctctgagcaaacacattgggatctcgctaacaagcgagcactgcgtaatggcagtgatcccaatgatgaattcgaaaaggtcggcagcgacgctatgcgtagcggcaagatccctttcactttcgatagtggtaccgtcccagctgtaaagcagttgcgtcatgcattgctgctggcaggctgtggtgccatcaatcttcagatcgatgaaatcggatcgaacctgatcggcaatgttgagctgctcaatctgttcttggagctgtatgaccaaggcatcgtcaagggcaagctgaccaagaacactgcggagaacactcgcagcgaagagattgatggtaagacaccaaccaatctgttgctcttcggtacgcaaagcaagttgctcgatgcaggacaaactgaggatcagttttactcgttcctcgaaactggctatgcacgtcgttgcatcttcggcattggctctcaagatcgcaaggctttccatagccagagtcctgaagagatctaccgccgattgatccagccgaacaacaatgcgtcagtcaagaagtggtctcagcacttccacgcactggctgatccagcgatgttcggatggcagatgaacgtcgatgatgacgtgtccatcaagttgcttgagtacaagatcgcatgcgagaaggcagcagacttgatgcctgagcatgaagagatcaagaaagctgagctgtcccatcgttactttaaagcactgaagcttgcaggcacttacgccttcatcgagcaatccactactgtggagatgggacatcttctgtccgcaatcttgctggtcgaagaatcaggtttggcatttcaatcgatcttgaatcgaaagaaatcctacatgaagctggcagagtacattgccagtgttgaaggtgaagtcactcacgctgatctcaatgagcaactgccgttctataagacgggtgttggcttccgtaacgagatcatctcgatggctactgcctggggctacaagcaacacatcatcatcaagaagcgttttgaaaacaacattgaattcttcagtggtgaaaccctgaaggagacaaatcttgatgagatcatcctgtcgtatagcgatagctttgcctacaactacagtgctgaacgtgtgccatttgatcagctgcatttgctgactcaagagcaaggattgcattgggcaaaccatcacttccgtgggaaccaccgagcagaagagaatgtggtacctgagttcaactgcatcgtcatcgatgtggacgaaggaacttcgctagtctcagctcatgagttgatgaaggaatatcgtttcatgacttacaccaccaagcgtcatcaagtggatggtcatgcagatcgattcaggatgatcattccgatcaactaccatctgaagttggaagcggatgactacaaggaattcatgaataacatcatgaaggctttgccatttacttctgacgaggctgcaaatcaacgagccaagaagtgggagacgttcgctggtggtgagtatcactacaacgacggtgtgatcttcgatgcactgaagttcattccaaagacttcgaagaacgagcagcatcaagcagagttcaagaagatcgagaacctcgacaaccttcagcgttggttcgctgcacggatcaatgagacgggcaaccgtaacaacaatctgctgcgttatgcgatgactctcgtagacaatggcctgccactgattgatgtacagaaccttgtgatctccttcaatcaaatgctggaagcaccgctcgatgattctgagattcgttctacgattctggtatcagtcggtaagaagtaccaacggagctaaccatggaacttactcagttcgaggaaaatgtaatcgtaatgcttcgtaagatggagcagaataatgaaacacctcaccgtcgtgtaatcctgattgactgtcagtcaagacaaccgctcattgaaattccttatgatgatcgtgggttcatttccaccagtgagccagttcagtcagaacagatcagtaacatgatggaatctgtcatgcgatcaagtgatgaaattattttgtctatgcgtaatacacaagcagaggcagaagaaaatatacagacgggaaagatctacgagtacatggtccacttcgttagtagttgattacctatgagtggatgacagttcttttgctggttccaagactgtcatccaactctgaaccaaggagcagagtagtgagtgaagaagaacaaatcgaggaagtgatcaatgatcagcttgtactgatcagtggtcaatccgctaccggtaagtccgcatcactgcggaacatccggaaccaagaacgctggctgtatctcggtaccgaggcaggcaagcgtctcccattccgcaacaagttctgggccgaacggatcaccgatccgatggacgtactgaactacatggaacagtgcatcgagaatcgtgacgccattgatggtgtgattctggactcgctgacattcctgatggatatgtacgaaacccagtacgtcatcaatgcagccaacaccatggcagcatggggtgcctatcagcagttcttcaagcagctgatgaatgctgttgctcggtttggtaagccagtgatcatcatcgcccacacgcttgacgtgtacgatgaatctgcaatggcaaccaagaccagcgtacccatcaagggtgctctgaagaacaatggtatcgaggcttacttctcgaccgtagtcagcaccaagaaggtgactgtcaaggaaatcgagaagcttaaaagcagcctgctggaaatcacggaagaagaacgcgaacttggattcaagtacgtgttccagactcgcatcaccgcgaagaccacaggcgaacggattcgttctccgatggggatgttcgacaagtctcagacctacatcgacaacgatgctcaggctttgctcgactatctccacaagttctacaatagctaacacagcgttgtagttgattagcaacacatctcaataagcaaaggaaaaatcatgtttcagaatttgaccaacgaaggtatggagcagcaggaagatcgtctgggtggtggcggtccgctgccgactggcgtctacaccggcacaatcaagcagttctatggcatcaagtctgatgccggtgccatgggtgtcgttttcatcctggacattgatgggcgtgagtaccgcgaaaacatctacgtcaccaatcgtaagggtgaaaacttctacaccagggacggcaagaagtatcagctgcccggcttcatcactgcgaacgacatcgctctctgcgccaacggtcagcagctcaatgagctggagtgggaagaaaagcaggtcaagcagtggtctgatggcaaggaagtgctgaaggctgcacaggttgctgttgatctgctgggcaagacggtcactgtcgctatcgtcaacaccctgaagaacaagcaggaaaagaacagcaaggatgactacgttgacgttgctggtgagcgtgccgagaaccacatcgagaaagtgttcgactctgagtcgaagcgtaccgttcgtgaagcaatcgacggcaaggaagaagctgcattccacgacgagtggttgaagaagaacgaaggcgtgcagcgtgacaagcgcagcatcaaggatggtggctcggcaggttctgctggtgcacctccgaaggctggtgctgcatcgtctgctccgacaacgagcggcaagtcactgttcaacaagaagtgatgaaaatcccagtgctaggcatggaccccagtttgcgtaactggggattggcagcagccgaattgtgtctggacactgggaatctttctacacctgtcatcagcattgttggtacgaagtctgatgacagtaagcgagtccgccagaactccaaggacttgcagaccgctgaagatctcgcagcaggtatcttgcctgctgcaaggttagctaaagcgatcttcgtagaagttccagtgggatcgcaatccgccagagcaatggcttcgtacggaacgtgtgtaggcattcttggttccatacgagcacttggtatcgagatcattgaagtgacgccgaccgaagtgaagacccacttcaccggtaataagaacgctaccaaagacgatatgatccgcacggccatggagtactaccccgaagcagcatggccgctcctgaaaggtaaagtggtagcgaaggctgagcacatggctgatgccattgcggcaattcacgcaggcgtacacacacctgtgtttcaacaattgatgcgacttctcgcatcctaatctcaaggaaataacatggcactggaaattaccatcgatcagaatgagatcgaaactgcaatccgcaatcacatcggtaccctgatcaccgtggctgaaggccagaacatcagcatcgccctgaaggctggccgtggtgaaaacggctactcggctaccatcgagatcggtggttcgaatgcaactgcatcggttgaaacgaagccggctgctgccccatctgtctcgggtccgttcaagcgtggagccaagccggctcagaccgacaccagcgctcctgtgggcgatgctccgatcccggagcaggatctgacccagaaggaagttgccgtcgctgataccggcgtacagacctctccggagcctgtcgatgtcaccccggctgaagagccggttgccgaaacgccgaagaagggtggcttgttccagcatctgccgaagcgtaccggtacggacactgaagccaactaatcggcctcaaccgtaaagtagaaagcccctcaatgaggggctttctttttggtcagttcaccagattgatccaaggattcaacagtggtgcccggaaggcttggcctaccccgacagagtagtccagggagccgtctgcaagcttcgcaaagaggttgtcctcgataggtagcccaacactaccaaacatcgtcggagccggtgcagcgacagccaggagcgaatgcagggggttattcctgatcatgctcagacccaccttggccgaacgtatcttgaagttccagaaccagagaagaccaatggattccaagtagcctcggaaccgacccggcagacggtcgtagttaacgaactcttccgtaatccggctcagggcgtactctggcgacttcttctgacgacgagtgatgtcgtcatagaggatcgccttagccacgaagtcaccgtactggatggctttctgcaagccttggtacagagccgtgtctttggtgatcaaggcatagcgaccagcagtgcgaacactctcaggcagacgatcaaccatcttctcgatgtaggcattgagcttgccagaggtcagttcgatatcgtcagcagtcatacccacatcagagatcgcagtgaactcgcctgcttctatcaatggccagatcgacaaacgacggtgagcatctcgaattgaacgcaactcagcattcaacttacgagtacccacgatatcgttgttggcttcagccacacgcaactcaccttcaacttcatccatacgaacacgagacttgacatagctgtcgatctcggctgccttctgaggatagccacgagcaacactcagcaatggcacaccacgaccaaccaactgatacacgttggcaatcgagttagagatcggaacaaccaccgacttcaccacgatgatcgtacgagcatcttggacaaagttctgaagcacacgttctgcattggtcacatacctataggctttgttaccaaacagaccaagtgccaacttcttcgcagtgtcagtagtctcacgagaccagcgagtattaccagtgaacacgtcaccagtcgatgccgaacgatagccgatagcatcgttgagcatgtccttacgaacgtagaactcttcaccaaacttcgacttgatgtacttacgggtctcagcactgaacagacttgctgcatcagcaattaccttgtcagtcctcttgtcgaacagatccacatacatctcttgtgcagtgctcgacgccttcgtgtcggattcgtacatgtcatgcagtgcatcaaccagacgctcattgaagaattgagccttcgcctcttcaacctgacgaccacgccagacaccaatcatcttggcgaagtgatcgtccttgttgagacgctgcatctgttgtggatcaactgcacgctcataggctacagcattacccttctcatcccagatcggcatcaaaggttcgctctgactggttgtattacgctgaccataggcagcagcagtacgactgatcaatgcaacttctgcacgctcagtgatacgaccagcaaccatggtgtcgtggctgaacccggtcacagcatccacaccgttagaggtgtgacgaacattttggaagatgccctggttgtaagcagcacgcccagacacgggtgcgtagtagtagcccttcttggatcggccacgctcaaggtaatcacccttgtagtcagcaacacgaacgtagctacgctcagccaacttggcaaactctttgtcctcagcaaccaacaggctgacacccggctgatcaagcgtagggatgtatcccttgaattggttgtactgagcacggttggtctgtgccttcgtgtactcatccttacgctgaccacgcaggtaagacacagcaaattccataccctcagcttcattggtgatcaggttagccagatcactgcgaaccatgggggtaagtgactccaccgcgtacagagaagtcagctgatcaattgcatcaacgacatcttggccaggaatcttccagctaccacgacgactctcattgaacagacgtgagatggccaatgcattacgcagcaagttgttacctgcttcacccgtcatcatgtagttggccaactgctgcatcttcttctgatacgtatcgaagttgatcggcgagtgattacgcacagtgtcttccaacgcagtgatgcgttgtgcacggtagttgtcatcagctactgcttgcagtgcatcggaatccaatgcagccaagtccgtcttaccaagaccacgatgcagcatagaccactggtccttggtcagctcacgcttgaacttgccggcaatgatgcccggcagatgttcgcggaattgctgacgatcctgttgaaccatggcacgaacagtcttgatcatgtcgtagatggtcgagttgttgtcagtacgaccaaccagatcattgaacagatcttgcagtggcttccagagattcgaacgattcgacatctccatgaagcccatagctacctgagcaccattcttctcagttgccatcttggccatgatctgagcagcaccagccagcatacgaccagccttggtgttagcacgttgctcagcctcagtcgccttgacgattgcagcttcgctcaacttctcaacaccatcaacgatgtactgattggcacgatcaaacacaccgccagtcttggaagcgtattgatccatggcactttgtgtgtcctgcatcgtgtcgtacatgtggctcatcagagcatccatagctccaccaatgtcacgagagttgctggtaccagacagataaccactcagcctatccattgcagtctggccggcattctccaacatgccatccaaagtacgaccatcagcacgatcagcctttggcaatgccatacgactcaatgcacgacgcagagtgtcattggtcatcgacaatgcaacgaacacaggcagcagtgaactacgaccctttgcatcagttgtggtcagatagttacccatgatgacgttgtactgctcctgcgcatagtaacgagcagactgaggatcaacaggattctcaggcatcaggtcatcaacggtcagcgtcttggtgacatgcgagaacagctgctgtgccttagccaaagcgttggcatccagatcaatgctcatcgtcatggcagtcgtcaggtgacggaacagtgcagcttcctgcatggtcattgggaacccatgagcattgaccatagcagtcagtgcgcttgagttacgcaatgcattcagtagttctttgcgccgactctcaccagtgtgtgggtcaacccgcacacgaacatagtcagcaactttacgcatgaaagtttgctgcaaagcagtcagacgatcgttgttgccaaacaatggattctggaacagagccgtatcacgaacgccatcagcaatcgttgggaacgaacgaatgatgacaccagtgttgaactgaagagtgctcaatgcatcgtcagcaattgctggtgctttctttttatcccagaacaattgcttcaggaacttgacaacatccttggccatttgaaccaaggagggtgattgcttcgacttgaggttctcagtcagctgttcattggtcagtgcccaagccatgaactcattgagtgccttagccttggccacagcatcagtgacatcgagatcagactgggcttcagtgatgacagcttgtgcagtagtcacagcaacgttgttgctcgtgtcctgcatgaactgatccatcaaaccttcgattcgagtaatagcatcagccacttccggagacgaattgccttcgtagtgagcaagcaccttctcgaaagtagtagcgtgcacctgctcatggatcaacgtttcaaccgaagcgttgtagagatagatggtcttgtcagcaacgacagttgcacccagcttgtcctgcggagtgatgatcttgcctgttgcattctggtagtcagcaatctgctcggcagtaccgaacacgacttgccagtccttcatggactgagaacgctggatttctccgaagatgaccttctgtgcatcagtcatctcagccatgcgaccaaggttctgtagtgccgtgtaggacagcacacgtgcaccagacttgtgagcacgacccacttgatccaagggagctgatacagcagccggtgccttcggagtgacagtgatcacaccacgcttatctcgtgcagccttatacgctgcctgcaatgcagccaatgggtcatcgaccggagcaataccattgctgtagggagcaccagcagcagccatctggtcaactgaattggccacagcctgacgtgcagcgattcgatcagcagcagattcagcagaccacttgagattcagacccaagtcttccatcgctgcttcaacagcagagggagtgcgaacttcgttacgctcaagtggaatacccaaagcacgatacagatcggccagcatctcttcggacacattctccatcgacacgttcttagagaacttgacccatgagtcattgacagcagccagaggattaccctgccagctctggtatacagcctcattggctcgacggctgtaatccatcagacgactatccagtgcgatgttcataccatcgaacactttcagagttcccttgagtttggcattggccaagtactgcatcatgcgaccatcgcctgagccaatggtcatgaaagcagcaccggcaacaccagcattcgctgggccatagatataggcatcagtgctcatgcggctggccttactcagaccacgaccaaactctgacgcaccaacatcagtcttgctggatgcagcaatgtagaaacgctgtgcaccggtatcgatcagtggagccagagtctccaacttcttgtagataccacgcagctcagcttgactcaggaactcagtcttcttgtagttcggatcagcagcagctttgctttcaatggcagcagcaacttcacgcttgaatgcatcttccaggaagatcgactggacctgagtagcacgacgaaggatctcaacagccttcatcatcggtgcaccaacagtcgcagtgatgccttctcgcatcggagcaacaaacagatgcagcatgttctgctgaatgttcttgatctgatcagagttgaattggaactcaacaggataagccatatcgacacgcttcgtcggagcgtcatcccacttgattccgttcttggttcgaacaggaaccacagaagttagctcatccatagcagcatagaacgtatccaacttctgctgtgcattgacatcattcacaccgaacatggcctgagccatggagatggaactatcagccttctgcatcgtggcaacagtagacagtcgctcatagatcttcttgatcagcgactgagtgacattgcctgcaataccattcgcaccagaaccatagatggtaatggtgagtggattcttcagtgcaccgcgacccagagtcagtacaccagtctcgttgtcgaaagtgatgtcattaccaaagaacgcatccagcacagtaaacagtcggttgatctgatcagtaccgtactgatcatcagccagttccttacgcagtgagtccacagccttggctgtctcatccgtagacgcttgatagagatccttcgaatcaatgctagaacggatctcattagcagtcgttggtgcaccaaaggtgacaccacccttacgcatgttgttgacccactgctcactgaagtcaccaatcgtcatcaagcccatggcattgatcggaccattggtcataccgtctgcttccagatacaacgaagtggtgaactcgccacgattgctgtcatcaagacgagcgtactcactcagagaatgcaaagcagccggagtcatatctgcaccaacagccttaaaggtgttgagcagagtatctacgtcagtctcgttaacgatgtggctacctgagttcaacgactgaagcaggctgattgcatcacccatcgaagcaagcatgccttcgatctttgcaatggcagcaggccgctccatgttatggaccttgacaccaaagtgctgaccaacagcaacaatgaagttgccatactgatcggggtcattgagattcaatgtggcacgagtaggcaggattgcctcacgaacaaccttgctcgattgcgggctgtacttacccagcatctgcatacgaccaacacgggacatgttgtaacggtaacgcacaggcatgtcagtgacatctcgcccagcagcctgagcaaggttgttcacttcgccatacacacgagccagggaattcatggcagcagtgatcgtacggttcttaccctcaaggctggctgcatgtgccttgtttagaacctgaccaccgacattgcctgcaccgaacagacgctgcaatgcacccatacccagaccggtatagacattgatcatcgtctggttgacatagaacggagttttctgttcttcacgcaaagcagattgctgatcctcagtgttttcaaccagaggattgttcatctgtcgcttggcgacttccatctttacatcgtcaccaatgaagttgacttcctctggttcaaccataaccgcatgctcaattgcattcgggtagtcattgattccagttgggatagcatcttcagcgacaacgtagcgattgaaagtctgcttgtgatcaagtccgtgacgctcatccaaagttacgttgacaacattcaacagcttgttgtccaccattgcctggatgacttcagcagccatcgactcaggaatgccttccacataacccagtggtgcattgctgttagcagtcaatccccaataggacttgatcttctgagccagcgttcgcttagcctcagcagtactcatgccctggttcagttcttcgatcagatcactgtcaccaagagcatccatgttcaagccggtataagcctggaagtcttcagccgtcatgtcttgcgtatagacatcaccgttaatcagccaatgcagacctgcaagcactgcgttctcaaccaagttttggttgtacgtcagcttgccatctacgttgtcagtgatgttgatcagcttaccgtcaagccaagtgttgacatcagactgaccgctcaggaaacgaccaccaacgttcttctcagagaggaaagtttgcagttgcttatccagactcttcttgatccagttcgcttcggaaaacagagtacggtagccgtcgatgacgtctacggtcacatcgtgacgcacagcgtcacccacatgccgaatgaagttctgcccagaggacagtgcttcttgaaccatggagagaggtgactcactgccgagggtgtgagtacgtgcctcatcaggcagcgagtaggcttccttgaatcgattcggatacttgtcggtctgcaccaagttggggaatacagcttccataccttgtggtgcaggctcagcttcagcagtctcaaccacatccggaaccgtctcttcagctacggtttcggtagctggctggggagcagaactaggctccacaacggcttccggttggtcaataacagtctcttcactggaccttgattcttccatgacaggttcagtttcagctgaggtatcatcttcctgcacctgcgttgcaggttcctcggtaggggccgagtccaccacgcgtgagttacgtcggaacgagtccgctacctcttggatcggaccttccagacgcgaatccaaggagaccgcaccaacatgaccaccattcaagttcgggaacgaatcgctcaggccgttgtaaacgttggccaacacttgggcctcaagcgcaatctggtgcgcttgctcaagggatttcgtggagcgagtgttaacgtacagcccttttgcggactgcttccacgtccggtcaggttgaagtgccatgtaggtgacaccatcagcgttcggattccccgcagcaaagtgagcgttgagcgccccgaccttgttctgcatatgctgcacgaactcgctaaagtcggtcagaagggcagcagcgaggttgagattacccgcagccacggccgaacgaatgcccttgtagtgcaccagggctgacttctcaccatcacccgtacgcatcgtatccgtggtgatttgctttgcaacaagatcctgacgacgcttcagacccagacgatccacagcttcattgtatgcacgttgttcttgcaagatcgtcttactgaaggtcaacgcagctcgctgatcaggagtcaacaccaaacgtccttgggactcttggtagaggatctgatcagcagtgttcggatcaagcttctggggtgcattctctgcaaccaccaaagcttcattgaccgcctgcttgccggcaggagtttccacattctcatcggtcacttgcggagcaatagaaccatcttcagctgcctgcatcttctgcatgacagtggtcagagcacgattgatcttcggcgtatcaagattcgccaacagtcctgcatactggttcagcagttgagcaggacgactctccggatcaagtccatccaagccagcagactcacgcatcttgaagtcctgtacggactgagccatgcgcagtagtgcgtaaccagcttcgatagagtccggcgtatcttccttcactcggttgacgaactcagccaagttctgcattgcctcaacacgattgccagcattgagaatcagtgggcgaatgttctcaccataaccaacttcatcgacttcagccgggttaaccgtcagctgattcatcagagtatctacgtaagagacagcattagctttctcttctggtgcaatgtcttgtgcatcaatagctgcacggatctcttcagcagccataggtgcttgagccacagcttcagcagcagcattgcctacaacagagtcagccaatgggctgctcttttcattttcagcaatgatgcgattgccacgttcaataagactattgaagactggggacaccacagccttcagaccttgcatcgtgccattcgctgccttgagtgcaacacgaccacttgcacctggaagctggacagtgccagcagcactgaagccatagagtgcaccttgaccaacctgctcaccaacaccttcagagagttgttgatccgggttgacgttctgttggatggcatagttctgagccagcccaccagtaccagactggataccttcttccagcggctcacgtaccaaagcgttagccaaggcagtacgcaggttcggcacatggaatgggttggactcgaaccgagcaaccaaggcaccagtagcagcagcaatcggagcctggatggcagcagcctgacgaccagcactatttgccagctggatacgtgcatcctcttggctcacgccagaggcgaccaattcacggaactgggggctagtacggttgagttcgtcaaacgactgctccatgacagcgttcgtcgtctgctggtaagcaccaccagcttccatagctgcaatggcagcaggagtggatacagcagaacctacacgctcagcaacagcggcagtagtagccagagacgcaccagaggctcgaccaatcgcctgagcgatgggagcaccaatagcacgtagacccttgctgattggaccagcacccaacagagaacccacagcatcagacgtaccctgcataaaggtcgtctcatctgagaggccgttgaccacagtattgactgcatctcgaccaatctgccggagtgctgctggaagctcccccatggactcacgttcgctttcgaactgtgcctgggagtctcggttctccaaagccgtgacggcctgtgtggagcgcctacgagcgttcagcacatcagtctgagtgccttgcacgaactcgttagcatcttgaatcttcccagatgcccaagcaccagcatcatcactgacagcaccgagtgccatagcaccaatgccagcaaaggcattgcccaagccggaaccaacaccagagatgatgtcagccgatgcctgtgacagattgcggttgttcagtgattggtctcgttggaaggcagcattgcctgccccctgagccaagatgagattggtagcattgctgccgtacttcgcatagatatccgaaggcagcatggtgcgaagatctgcttccaattcactcatcgtagctgcaccagactggttgccctgtccagcagctacttggtagaaatcgacgctgttcatgtcaggcgtcgcaggagcagcgacttgcgccggggctggcagcacagggtcactattgaccggggtgctcagagccgaacgcagaatgtcggtgatcgccatcttggttggagtccttgttagaggtaagttggtagagactacaataacagaaaaccccgccggagcggggtcttccttgttgcagtttacggtgcaccgaccggaatgaacatgtcttcattcgcctgggcttgtcggagaatctccgttgcccgattgaatgaaccccctcggctttctgctaccggctcaggctgcgtccgttggaagtcaggacgcagctgcggcagtgctcgctgcgcttcctggatagagtcaagttgctgacgagcagcttgaacacgagcctgatagcgaggcagctgagcacgaagccccggctgagttgcagcacgttgagtcattgcagacagctgtgacactgcatcgttgtaggtagcctgagcagattgcaatcgagcagcaaccgctcccgtttcctgattggaaacgaagttagtgaattgactgccgttacgcagactttcaatagcagcatcgatcccatcatcgttcaggcgtacaccgttaccgagatttgggctggaccgaatcggtgatagcaaacggttaactccgtactgcaagtactcagatgcagacccaggagcgttagtgatgtttcgacgaagtacagcaccagcagttgcagcattgacgttaccctgagacatcacacgctgaatttctcgcatgatgtcgccacggttcgaaccagagaacgaaccactctcaccgatcagttcatcaactacctgaccagcatcgcggttatctgcaacagttgtgccaaagtcattgctgatgccagtagcattgttctgcattgctcgcgtcaaaacttcggcagtaccagcattcgtctgcaacgcttcattggcacgaccgccaactgcttgaccaacttcagcttgtgaaatgcgttgacgcatttcatcccacgacaagtctttgtaagcacccggcttggagtcaggaagtgcagcccaagtatctttgaggttgccattcttgcgtgcatcgaagattgccttgccgatcttgtcctgattctcaggcgtgaacggctgactcttccaatccgcacccagcaccttcggaccgaagtcttcaagcgtgcccttgttgatttggaatgcacccaatgggctatgaccctgacgactgatcattccagcttggtgttggattacatcaccaatcgccatctgcgtgatcggacgtggcgttgcctggaattcaaacgtcgtgtcgtacgcactaccttgacgagtaccagcagtacccggagcagacacacttgcaccaccagcagaaggaccagctaccgctgcgcctgaaccaaggggaccatacgtaccggggaatgctgactgtacaaggcgagttgcttgagcacgaatgttcggatcaaggttcgccatgctttccagagttgcacgtgcatcttctgcacccgcagacatacgcagtacgttgttggcaacgacctgtgcttctcgggattcagtgtcattacgttgatcaataccaaggttgtactgatcacgcttcagaccaaactcaccggtgcgctgaccaagttcacctcgggtaagaccctgagtgttctgtgccaatgccatcgattgctcaggattgaggttgcgcagcagaggtccatagacatcctgtagctgcgtaacttcagcctgattaccacgacgtgctgcatcagtgatgcgattgattgcttcacgagcagcatcagtgcgggtattcgaatccacagtacggttgaagccatactggtcttgttccagattgaatgcaccctgttgcaatgcttggcgagtacggtcttggttcaaacgagaaccaacttgatcctgcaaaccagtaagcacaccagcagacaaacggttcgggttgataccttgcagcaacgaaccatcagccagtgcaccactcagcccagcagcatcttgctgacgtagtgcacgcatcaatacttcttgatcagcagctttagtctgctgactgcgaagcatatcgatggtgttgttggctgcgccaaatgcgttgttcaactggtcattgaacaactgtagcccacgcattgagctactgaagtccggaccttcgataggacgatattgaagagtagccatctgtattccttacccgcgagtcagacgattctgctcgacgtactgatcacgttctgcatcagactgaccttcaacaacagcacgagagcgagcacgatcagccagtgcagtgttgtaagtctgcatcgagttgttgaggttcgtattagcgaaactcttggtgaagttaaattgatccttagccagcttgttagcctggaatgcaccccacaaaccaccaagggtttgaagaccacccagaccaagcttaagggtatccatattccaaccaagacctgaatcgcctgcaccactttggggaggaacaaagccagcaccgttggctccgtagttggttgctggcaattccgccatgccagttggacgacccagaccatacgagcctgagaagatgtccgtaccacctgtgatggagttggtaccaaagttcagattagccagtgccgggtagctggactgccaatcttgtagagtcgttgccattggcgttgcctttacgtttgaagatttgtcgaaagagtcaggtctgcaaagttgcccagcatgtccaaactgagacctgagatgtcactacctaccatcagagtccgctcaaggaacgatgacggactttcagggatatagcctcgtactgcttcagtcaaggagagggggtcaatcacacccttgttcaccccgaaagcgtcggcataagcctgagcaatcgcctcagattctaccttataaccctcgacgatcttctgagtctctagcaggatatcttgggtagaggcgttcacatagttcgtgtaggcgttcagaccggtattggtcagtgccaacaggttctctgcccgcatcatgttggcaaacccagctgccatggactggccactggccatggcactaccaacgtttaagactacgaacgaggcaatcacacctacgatggcaccaatcttgtcaccgaacagagcagttgcagctcgctgaatgatcgataccagaatcatggcagcaatggcattgatcacagcgcccaccacaagggctgctacacctgtcagaccgacagctgcacctaccgcagcacttgaaccaaggatgccagcagcgcctgcgccagcaccacctgtgtagattgtgatgatgatgatcacaatgatcaggatcaccttgaacaagccagtctgataccacttcttcttcactacctgatagcagttgaagacaatgaagctacatgcagtagccatctgagtagacttcaccagaggcattgcacggtagataccttcatgcagtggcacgatgaaacctgattcgtcagtgtcagccaatgcatcagcagcatcgatctcaacagccttgcccttgtagatttcattgcgatgcatcagaccacggatgttcatcactcgatacgagttgttctcatcctgccaatagaggttgatgtcattgacggagatgttgtcgagaatcccccagatgccaccaacaaaacccagctcatcaaatagctcattcacccctcgactgaaccacaagtctcccttcttggctcccggcctaccaagaccattgtgctcagtctcaatgatcgagttccagctaatcgtgatgttgtagttcatcacgttgtttttgtcagaacggatcttgatttcgttcgtaggcattggaggatacggctgttgagccggttccggagtgccatacagaggattgctcgaatcagactgagcagctttccatgcagcccactgttgcatagttgcatcagctgctacccaggcaagcttccatgcagtgtaatcaccatcagtaccaacactggcagattcaagaatgcccttaaagaacctgtagacgtactcacggcaagcaacttctttgacgttgagtgacacaccgaacacggtgtaagcgtagtcgatgtctttcaggttctcgttgtccttgatcttttcgatcaagtcatcgtacttaccagtcgtactcttcttcagtgctttcttggattgtgcatagacatcaggcaagttcgtcggcgagacaaactcattgttgatacgaaatggaatgaagggaaagaattgctgatcaccggtgcgtggattgaacatggcatccagtgcagcattgcctgaaccacgacggtaaatgaaaacttgagcatcactccaactggactgaatagtctcttgagtatcaatacggtaagaccgttcaacaccaagattctcaacagtagttgtcgtcttagtagtcttggtaacaccaccaccaatgtcttcatcaacagacacgacagatacagactcagtgacatcacgagtctgatcttgatacatcgtcgattcaacagagtaggttgaatctgacccaggcttagtgcctttgaactcatccttcatgtagacacgatggatctcttgatacgtctcagtgcgagtcgtacttgattccgtgtgctcagcaggacgaccatcagagtaggtcacatccttttcaacatccgtcttcagatccacatcagtattgaccactgaattcgtgatcgattcccaaccatcgacagacgggtatggttgaccttgagccaggacgactgtatcgccaggaacaagtggttgctgttctggatcgtttgccaacaagtatgtggcatacaaataccgactcgtgtcaacgaagtcagcagcaacgaaggtataggtcacaacatcattgaagagaatacgaatcgtctgaccttcaatgtcagcagtccaatcttcattaattcgatcaggatgattttccagcatccagcgatcagcccagaaggtgtaatcagcatcaccaatcttgaccgattgaacttgaacctgctggttcgctgcatgaggcaattcgttctttagaacgttgacatctacagagttacctacagaaatactgccggtcacaagaccgacagtatccgtataaccagtacgacgagaccaacgagcaaagctacggaagcgaattgcaggaccattgagataactgtttgtgatcgtctgtccaagacttgtaacattgttcaagatcccaccaaagacagttgtcttcagataggacggacgctcattttcatcgccagccatgttgtagatgactgaactaacgtaggtcttctttcgacttccgaacatgcccattagacaaatccattctcagtcatgatcttgtccaacaccttatcgagattggcattggtgaaaccatcaggtggagtcaaaccttcatcaatggtcttcatggcaatccatgcatcaatgaacggacgacctgccttgacttcagcatctcgcttgtaactggtgatctgctgtgagtacagctcacgctgcttaccgacagaacctgcaaccgcagagccatcggtacgagtatcgagcgtctgtgcacgctgtgcttcaccttgttctttcaccatcagccactgtgccggcaagatgttgcccagattgtagacagccgtaccgtaagcctgatcttcagttgccagcttcatggtggtcagtgcatacgttgcaccagaagtctgtgcatccagaacaaccttggcgtactcagccttagccgtttgcgtttgaaccagagcagcaaatgcttgcagctgagcaacttgtgcctgccagaaagcttgatccttctgaagcaggaattgcgttgcattctgcatcacactctcaacgagtgaaatgtaagccttggtgtagtcaccagcagtaatacgacctgcctgatactccatcagcaagtgttgcttggcactcgacatcagcttgtcgaatacaccttcaccagtcggacaaccatctgacagatctttcagtgcgactgaaggaatatttttgaatagcggactgtcagcatcgacaggtagcttccaaatatcgtcattccaatcgatatcaggcaactggatattcagatcttggatgagataagtgaggatgctcttggcatcctgttcgccgttttgacgtgccatgtcttgatccacgtagaaagaaaaaagcccactgaaccaagaaggtcagtgggcctagtttactggcttccagtcagcttagccgacttccgaagtaccagctgcaagctgagcagtggccagctgcttgagttctgccggagtcagatcaggcagatcttcgatgccgaattcggttgcaagacgagtagtgacgatcacctgaccggtacccttgatcgtcttggttcggatgtccacgtacttgcgggctttcatctgatcatagatggcctgctcaatatgccaaccattgtcggtggtctcaccgaatgggacataccgcttgatcgcacccatgaagttgttgcctacagtgaagaactcaccgggcagatctcgcttgttcgggttgtggcaggtaatacggacacgacgcagcttggttgcctttgcacgtagatacgagtgcagggacacaggcttggcgggtgtaccttcagacgaagtttcagtgcccggcattggctgagcaaccttgtcagtaggtgctgcattgcctgacatggcagattgcagctgagcacgcagagtctcaagactggcgttgttggatggggtctgacccatcgtctttaggcgtgcacgcaacactgccttctcttcattgtcacgctgttccggagtcatatcctgcgggtccagcgattcggtgttctgttgttcgctcatggctgctacgttctcttgatgaaattgaagatggggagatcactctccccatcttggttccgctaccgattagatcggagcaacggtcttgatcagacccagacgttctgggcgcttgatcaggataccgtagtaccacttgatcgagctgaaaccagtctcgccatacggatcgttacggtccgcagtctccttaccaggagccttggtgatgaccgagaacttcacggtcttgccatcggtctggaagccgatggtggtgaacgcatcatcgccgacaaccagcatcgggaagatgtcgtagcgttcctcaccagcactgttcgtgctcgaacggtagccaggattggtaccaacttcggcacccttcgcagcccagtgcagcatctccggaacctgcacgatacggaacgcatcgatggtaccgatttcgccgttcatgatggtgccagcagaagcatagtgctggatctcaacgaacgccttgttaccgaacaggtcggtcatgcccttcagcagcggagccagttccgaacccacgtagatcactcgggtagcacccagggtcttcgtgtcgatcagacgggaaccggtgatgatggtggtctgcgtcggagtacgcagatcggtcagcgtctgatccagacgcatcagcagacggtagtccaccaacgaagccggaatctcaggcacagcaccagcagcaggaacaacttcaccggtgacttcgccatcattggttgcagcaccagcgtagaacacggtaccagccatcgacagcagatcggtctgaagcacagcttcggtcagctggacagcaccgttcatcagctcacggctcaaatgatccttcagctcgtcatccgagtcgaagtccacagattcctgggtccactcgtagaagaagccgaacttgtgcaggctgccttcacgttccagacgggtgaagccaacgcggttcactcgaccaccgttctcggtcagagtcggcagcttcgaagtgatcacaccgatgtccttcgacgaaccatataggttgccgttggcaatggtgacaccgtttgcgtcgataccctgatcgttgatgttgcgatcatccagcaacggaacgtagtaatagaccttgatcttcttgccgtagttcttcggcatgttggtgacgttggccagcggcatgaagtactgatcacgacgtgactcgatgatcgacttcttgagccacatgaaggtgttcatctggtcggaaccagcaccgtcgatgctcgacttgtcgccctcggcgggggcattgtaattcagaggcatgatcttcagatctcgttacacgcggcctgccatctgacgtaggaagtcgtcgtcggacatggccagaggattgatgggagaagcagcagcttttgctggcgtactgcgggttacagccgcagcttgagccttgtccgatacagtttgctttgcaggttgagcaacagtcttggcgacaggtgccggtgcttgcttgaccggttggtgggcaaccgtagtctttgcagcttcggcctgagccaattcgttacccacttcccggtaagcaagcaagaacggagtagacacaggaatgacaccgagagtacgacgacgattcacttcattggcaataacgtcatagacgccactgacacgatgttcgtggatggtacgcagcacagcaggttcattcccaaccgcatcgatactggcttgatcccacttcagagcctctgcaatggtttcttttcctcgatccattgattgaagttcatcaaccgtggattggaaatctacctgccgatcactgacgcgatgattgccaccttgatacgtcgattctgcatcaacatcgatgtctcgcggatcgatgccagaatcctttaacagcttctggattgctgccttgtcacctttactgaggtcaatcagaaaggacaactggctttcatccgtcagcttatggttttgcagcatggccagaacacgacgatgcggagcgagttcctgcatcttccgggtgtagttagcacccatctgcatcagctgctttacttcttcaggacttttcagttcgactttgcgcccattcgcagtgaatggcgccataagcttttcatactcagccttgtaatccgggggagtctcggtagtaccagccccctcagcaacctcaccagtaccggaactaccggtagcgtcaggattgctgttggcctgagtgccctcttccttgaccggaggggtagtctcagaaccagggggaggaacagtgccgtctcccgtatcggacggcgtgacattaccaccttccggtgtgccatcgccagtgttcgtattctctacaacttgttgagtttcttcaacaactaccggatcagttacttcttcggtggtctgggcaccagcatcttcctgagtggcaacctgctcttgcatcagagcaggcacccctttattcaggaattcttcgtcagacaattccagaatgcccggcatgggaattaatcctcaatgctctgggcatcgtcttcctggcgagaaagctcaatggcttcttccagttggtcgatgttgttgatctcgttcgtgagcatgcgttcctgagcgaggatatacatctcgataccaccagttgcttgtgccatcttcaggtacttggcctgttcatccagactctggccaggatggatgctcatctgaaccagacgggcacactcattcttggcatagtccgtgaggatcagttccttgaaatcccggttctgacagaggcgttggagcttttccagcttgagcttggcctctttggccgaattcaactgccggacgagggcttcggttgtgacttcagtctgcatgactaattggtctcgttggtggttttgtaatgggacgatgagccgaggaccggctcaccttccacaataatagatctatgttgttatacctgtccactacgggatagggcattgaacccaatcgccgcttcgacatcaccttctcgttctccctccttccttttttcgaggagagccttggtgatttgcagatcttggttcccttcagcctgactctgctgactttgcattttctcaatgtgcttggtcccgttggcttccttgactgtatccacctgggtggcctgggcatcagcaacagctttctgggtttgagccttgacaagatcaatccgggcctggatctcctgaatctccatctgagctttctgctgttccagttcctgcatcggattcggttggggctggtaatcctcaatagccttggccagatccggcatacgcttcagcagagcaattttgcgcaggatgattttggtcatgttgaagtccatgttcggaccgatggtctgaagcatgaatcccagatcctgggcttgagtgttgtcttgctcaggagtcgagacatcaacaatgcagtcgaagttgcctttcagatcttcacgattaactttgacaaactctttattggtaatacggatgacttcgaattcactcagaaactctgagttcatcgcaatcatcttggcaccaatctcttgcatcaacttcgacaagcgacgaacgatgctcagttcacgcttactcgatgcatccagcacaccacgaataccagcagcaacatcacccaatgcagcggaattgataccttcaccgaatcccttgacgccagacatagactcagcgtcttggttctgcaactgcaacatgaccattgcagactgaggaatctcagggaacgtgtgttgaataacaccagcagctggtgtgatattcgggttgaattcgtagtcgagaccattgtcatagcgacgacgattcaatgggtcaagcatgcccttagccatgccctgctgaccattggcactacgccccatgatatcgatcatgccacgcatgactgcgcctacgatgcgctggttgtctcccagcagctcagcgtcaggttcaccatacagctcacgcttcttcggtgagtagcgtgcaatgacgaatggcagcttggcatcagggaatggatttacttccatgcggacaaggatattgccgatccaagtagccacaataggagtcagatcgccatcaccatcaatgtcgtaaaagccccagtactcaaatgcgacaactttcttacgagccttgtcgttgaactggaacgtatccggcgtgatcgtttcatgctctggatgagtagctggactgttgttgtcccagatcactttgtccaaattcttgtaacgcttgccttctttcttcaactcgctttggctcgtttcgaaagagacgatgacaaacattgccttatcaagatcaccattacacgatggatcgatgatcacattgtgtggattcagcacttcaagaatcggacgattctctattagcttatcgaccttggtagatacaacgcctgtctgtattgcataggtagcttgcccactttcatcatacagatcgacacaagcacgagtagcaggatcaactgattcgttgtatccgcgaggattggctttcttcaattcaatcgcttgctgcaaagcctctgcttgttcagcagtttcgatctcataatgatcgaacgtaggaacatcttcgttcactttgatgctgtgttgcttccagccaacacgaacaattgcagtgccttcgtcaacatcactgcgaaccaagtcatcaaggaattgaaccttgttgatctgattgtcgaactgataattcaacagcagttgattctgctcagcagcagacacgtcttcagcagtccgtggcttaacttcgaacagacgatggttcgacagaaacggttctgacagtgctgcataacgccattctgcttgacgacgaatcagctttggctgcacagatgaacgcccacgaagcttctgtgggcgctctttacccgtcacattacggaggttgtcccactccatgatgcgagtcatctgcgtttgatgagaaggcttagctgcttccaagtcacgcttcaaactcagaagcgttggttccttcttccagtcc

SEQ ID NO: 8 - DNA, 44716 bp, unidentified
  misc_feature 1..44716: note = the genomic sequence of a bacteriophage
  source 1..44716: mol_type = unassigned DNA
tagagcgcatcaatctgttagttttttcccacagtgccaatggaggcacaacatgcacggttcgatcaacgccaatctcgaacgcacccgcaccaagcgccgcttttgccagttcaccaagactgcgagcgtcgttgacctgcgcaccaccgaatacgaccgcaagctggctgagcgcaagcgccaggccgagcggtacgaagcccgacacggaaccgctggaaagcgatctgtgtttgtcgttgagggtaacagcgggaccgcaagggcgaaccacgccgctgatcggagggcttacctgtgatccgcatacgcttctccgaccggttcccgtattcggcgtttacgtcgtggttcaatgcgcagcagcggcacggtgctgctgtgtccgacctcgttcacgacggcggatgctaccgctacaccatccgactcccgtaatgcaagctactagtccttcgcaagaggggctagtgtcgtgcaatcggcacggacccacctgaagggaaccaccatggacatcatcaccgggagcgctgacatcaagcgcgccatcaagtcgatcaacacggcccgcaccaagctggtcgatcagattcagcaggccgccgtagcggtcatcaaccacgcacatatccacggcgacgttacgctcgcttccgatctgtgtctcgccgtgggcaacggcatgaagcacgaagccctgcgtctgtatctgtccgaattcggcccgatggcgcccaacgacgacaaggagacgaaggcgagcgcgccgatgaagttcgccaagagtaagcgtgtggagggcgaggccctggccgacatgttggaacgtgccgccgcgaaggcgtggtgggacttcaagaccgaaaagcccgccgaggcgttctcgttcgccgctgacctgcacaagctgcttggccgcctggaaaaggccaccgagggcggctacgtcccgaccgacgaggagcaggccgtcatcaacgctgctcgcgccgtcccgaagcccaccaagaaggtgcaggcgtaatgctgcccggcacccgcgtcatcggagccggtgtgcgtgggtgccactgtctgaccgagggcaaggaatacacggtagaggactttcagcccgcctacaccgacccgaccagttcgagcggcttcacgtggcctgcatacgtgggagtcatcaacgacgaaggccggattggttactaccacacccacagattcaaggagaaatagcatggcgatcagttacacaaaccggggaaacaacgccgtaagcgcccgtgatctggttccgggcagatactaccgggagaaacacgacgcacgggacgagccgatcatctatatcgcaaccgatgaagggtgcgtggttgcgctggatggcacccagttcaaagtgaacccgctggaatacatcgaggtgcaggtggacgtttacgtgggagacgacgtatgaacgtcgataccgacatctgcatcaccatgccccgcgaggaagccgagctgcttcgctcggcgctgcacatcgccacccgcctggcctcgaaccttccctcagggtacggcaatcgcaagctggccgacgagttcggccgactgcatgcctacctgcgggatgcggacgtggaaatcctgaccggcaccgtgcagttcagcgagaagatcctcgatgcagtgagccgctatgtcatggccaacctcggccggggcatgcctctgcacgtaatctcgggccgcccgagcggcgggaagtccgcactggcagacaccctgctccgcgaacacctgcacacgctgcccccgcaattcgcggtgaacgccgacttcagcaagctggaagaacgggtggccgcgtgcctcaaccagcagcctttcgagttcaagcgcccgacaacgggccgcgagcgtctttcggacacgccgatgccggacaacctgccccgctttggcaagctgtgggacgtactctcggaaggcaacgcattcccaggggtgactgtcgccccgaagaagaagggctggatcgtgcagttctactgcgagacgaaaggcactggctggacgcgagtgctcggcgggatgtcggcggcaaccggagtctacgagtcacgtaacgaggcgtaccgccagatgcgggcacgcagcaagcacagcatgtgcccgctgatccgctatcgtgtggttccggaaggcacggcgaacggcgaggagcgggaccgcgggttctacaccgtggaatactacaccaggcatgggacagggccgcgcgcacctcgcggttgggccacctctggcatgccgggcatgaacggcgtcttccggaccgccacggctgcgcaagatgcaatcgataagcgcgtcagactgctcggcgagaggattcgcaagcgttaccgcgtgaagtggcacccaaaccacgcgtgatctaccgctatgccttctaacgagggcgtagctttggaaccacgcccaacaggagggcataagcaatgatccccgtaacttacaagcgcatccatagcggcaagcgcaagccgatccagctgtgcgagaagcctcgccagtggaaagagtacgtgacctatgagcacagcgtggagcgctggtatgcgtgaggtcagcctgcgccttgtggtgaaggtgctgccgctcgttaccgtggaaggtgccgctgccggggattatatcctcggcggataccacaccagccacgaggcatgcgagcaggccatcgcacaccaccgcctgcaccacgagaaggtgcccaccctctacaccatagaggaaatagaaatcccacccgtcaacgaggagaactaccatgcgtaagctgtacttcatcacgtccatcccggccaccgcaaaggatggcgtcatcactggcgtagtcgccaaccactcgggccgtgccgccacagccgaggaagcgaccgcgctggtcgagttcctgcgggagaagggtgcgtcgcagtccctggtggatgcgctgcgcgacggcacctatccgaatccggtgtcggtctttgaccggcgcggcgccgcacgtgccgaggctgctctgctgaattcgttcggtggcctgttcaactggtccgtcatcgcgctgggcgagagcatccgcaagccggtgcgcaagccgctgggttggcgcatcaagttcgacggcggctgcgtcagttgcttcaacagcactgactacggcgctacggtgcgcatcgacggcaacgaggagaaccatagcaaatacaacctgctgttcccgacccgcgaggcggcgcgccacgccctggacaccgaggtcggcgaggactgcaagcgcagccgccgtgacccgtggggctactacgcggaggcggtgtatgcgtaagctctggctgcgcatcctgatcctgctgtactggatcgttggccgtggcccttgggttgtcatcggacaatactacgacgatgaaggtaggctgtgccggttccgcaccggcccggcgtacatggggtgcacgctgacgttcgatgacatcgacgacgccaacaactactgcgcccggcgcaactggcaggcagacaccgacccactcggcaccacgtactacgtgtggcacgagatggagttcaacaacttcggacacaggagaaagtgacaatgggattcctcgacaagatcaagaagggcgcgcagtacatcaaggacaagttgaccaacgccatcaagcccgagcgtgacgacgacgacaccacgcctccgcctgcggtgaacacggcgaactacctgcacgtaagcgtgccgctggttcccatcgacaacccgatcctccgcaagatgctggggcaggattacttcccggtcgataaggggcagggtcagacccgcaacatcggcaacaaccacctgaagagcgtggccgaccacctcgggcacaacaacaagcagcgccgcaagctccgctctcgcatgaagcgccgcgccgccgagctgcgtgccggtgcgccgctggtgggtgcagcatgagccgggtgctgggtagttgggtcgaggtggtagtgccgcaatcctgcgctcacctcgaagccgtaacggattcgctggacgctgcggtgcaggctgtcggtggctgtactatcaccgagcagaccgggtactacaagcgcgaggacggtacggtggactacgagaacgtgttcaccgcgcgttacgacttcgacatcgacagtccgaacctggacgccatgctgtcggctgtgcgtggagtggtgcaggcgctgctcgaagcgggtgaggagtcggtgctgcgccgccggtactacgccccgagccgatccaccccgttcgccaaggcaccgggctacaagtccgagctgatcttcaagtaaatctcgcactgatttgcgtgccggaagggaccacgttacggaccaccaatcaacccgtcaatgaaaggagatacacaacatgtcgaacgagaacaccaacgagcagaccaccctcagccactacgaagcgaagcgcgccgagctgctggaagacatcgccaaggcgcaggccaaggtcgataccctggccgagaagctcgccaagctggacgctgtcgaagccaacagcgccgccatcgaagcgctgaagtccggcgactccgtgtcctacctgttcggccgcgccctgaacaagcgtgtcctgtccggcgtggtcgtcgccaccggcaagaacgacaagggcgtgctgcaactgaaggtgcagaccggcgaaggcctggatgccgagctgaacctgatcgacagcagcgccctgctgatgtcggccgaggaagttctgaaggcgcaggaagaaatcgacgccgccaaggccgccgccgaaggcggtgcgcagtgagcggcagcccgggcatcggcccgacccgcacgcagttcaccgcaggccgtgacctgaagccaggcatcggttaccgtgccatctcgaccggcgccggtgaggtggtggacagcgaccagtacctgctggtcaccaacgtgaccgacaagaagggcaaccgtcagctggtcaacaccagcaccggcgaggtgtccttcgccacgcctggctccatctggagctactgatccgacgaggatagcatgagcaataccctccccgataacgattggctaccacacgccgagcgcctgcctgttggtggccgcacacgagtgacccatgagtgcggggagggtacttccctgctgattactcgcgagcatgacaagtccaccgcgtactgtttcaggtgcggtggcacaggattcaagcatgagcacgagagtatagaggccaagcttaaacgaatacacgccgagcaagcgagcgagcgcagagtgcgcgaaactgttgagttgccagagccacgggtatacgacacccgcgagtggccgctcgatgccaaggtgtggttcttcaagatgggactctcgcttcagatgatcggcaagctgcggctgtactggtgcccgagcatcgggcgggtggtactaccgatcactgaaggcgacgacgttgtgtactggacagcacgaagcacaagccgtcaacccaaatggttgactcctgatgtgccgaaggatgggcttgtcgtacgctacggcgtgggcaagggggacaccatcgtgctatgcgaagacccgctatccgccttcaaggtgggccagtgcacagaagcgtggtcgttgctcggcaccaagctgcacaacaaagtgttgaagcagctgactgatcgaggccaacgtgtagcgacgtggctagatgacgaccgaggtagaagcgacggcagcaatcccggccaagacagcgcgcgagtaatcgctgcgcgtctgcgtgcgtttggtctggactacaggaacataacgtcaccgcgtgacccgaagtattacccgaccgattacatagaggagaagttatgtcaacagacctagccagtcagcgccgagcggtagctgtgtctttagtggcgcgcttcctatttgagagggacgacagcctctgcgattatgaacgaacggattacgagcgagaggaaagcgccaagctaatcgtccgagaggtgcttgaaatctacttgcaaggagaacccgatgagtcttgaaaccacgctgctgcggttgtgcaccaaccgtggaaagttcgagcggctcgtgcccagtgcaccacgtgacgggctggacgagctgaccgtgctggtgctcgatgcgttgcgtgcgtactacaaggagttcccggacacgaaggacttgccgttcgatgtgttcgatggctgggccttggagttcaagtggaagacgcagcccgacgacaagaagtccctgctgaaagttctgctgaagcagatgcgcgagcctgtcccgcccgaagcagagcaaggcatgatcgagaagctgttggagttggagctggcaaccactgcggtcagcaagatcgtgcagtggaatggcggcgccgagttcagcctgcgcgacgagttgtacggattggccgagtcgatcaacgaccgcatggatcgcaaggcccgccttcccctggtgcaggagacgcccgaggaactgatgcagatggacgagcacgacatcggcatccacttccgcctgcccacgttggcccgcaacctgcgcgcccttcgtggtggtgacttcggcatctacgccatgcgccccgacgcaggcaagaccacgttcctgacgagcgagtccagccactggatcacgcagctggacgacgtgtggccggaccagaagcgcaccggcatctggctcaacaacgagggaccgggcaagcgcatcaagcagcgctggtatcagtcgctgctcggcgctaccatcccggagatggtggagtgggcgaaggacggcagcatccgcaagcgcatcgaggatgcgatgggcggggacatccaccgcatgcagttctacgacatccacggattcaactccggcgaggtcgaggccatcatcaagcagaccaatccaggcttcatcatcttcgacatgatcgacaacatcacgttcagcggtggcatgaccaacggcggacagcgtaccgatcagatgttggaggcgatgtatcaggccgctcgcaactggtgcgtgaagtacgacgccgttggcgtggcgacttcgcagatcagcgccgagggtgagggtgtgcagtacccgccgcagtccgcactgaaggacagcaagacgggcaagcaaggtgcatgcgacttcatcatcatgggcggcaagctcaacgacccggcgatggaacgcttccgctacatcggcactccgaagaacaagctccaccgcgcaggcggtaagcgcgacgttcgggaagaagtgatgatggatgcagagcgtgcccgcttctatcaggaggcagcatgagcttcacttccttcgacctcgaaaccacgatccgtgccacgctgaagcgcaaggccaatccgttctacgacttgaacaagatcgtggcgattggctacaagcgcaagggtgatgcacagaacaccggcctgtactacgacacccgcatcggcgccgacaaccagtacatgggaggcgcacctgacgggtggttacgggagctgtgctacaacacgcagtacctagttggattcaatttgaaattcgacatcctgcacgccatctgccaaggcccgctcaaccggcaggcatggatcgagttcatcgacggcggcggcatggtgtgggactgtcagctcggcgagtacctgctgcacggcatgacgcaagagttccacatggcgagcatggacgagacggctcctcgctacggcggcaacctgaaggacgacgcagtcaagtccctgtgggctgcgggcgtggacacctgcgacatcgacaagacgttgctgatggattacctcctcggcaccaacgacaccgacgacgtaggcgacatcggcaacaccgagaagatgttcctcgggcagctcgccgccttccgtgcacgtggcggcctgcgctcggcgctgctcaacatgggcgcgctgtgcttcaccatcgaagccgagtacaacggcatgtacgtggacaaggactgggctctcgcgaaggcgaaggagttggaggtcgagctggcaacagcgacggccgaactcaacggcttcatccccaagctgcccgagggcctgaccttcaactggaacagccgcttccacaagagcgcactgatcttcggcggcaaggtgaagtacacggcgaaggttccgatcatgtccgccgaaggtggcccgacctacgtccagaaggacgaggtgcactacgtgctggtcgatggcaccacgactgcgacgccaccggccgaggacttcgagaacgtggggcggtacgtgacctacggaagcggcaagaacaagggggagtacaagaccaagaaggtcaaggtcgatgacctgaccaagcagaagttccgcaacgaggacatgctgttcgagttccccggctacaccgagccggatgctgcgtgggaaagcaagagtgatccgggtgtgtactccaccgccgccgatgtgatcgaggcgctgagctaccgaaacctgccattcaccaaggcactggcccggcgcgccgacatccacaaggacttgtccacgtactacatcacgacggacgagaagaccggcgagcagaagggcatgctcaccctggtggggccggacggtatcatccaccacaagctcaacatgaccaacacggtgacgggtcgcctgtcatccagcgatcccaacttgcagaacgtgagcaagggtgagctggacgaggagacgttggaggagaagggttcgcagatcaagcgcgccttcgtgtcccggcacaagggtggcaagatcatccagtcggactacacctccctcgaaatctacgtgcaggcaatcctcaccgagtgccgtcagctgatcgaagacctgaaggcgggcctagacatgcactgcctccgtgccgagcaggcgtggggtgagcaaggcaagtacgactacgacttcatcctcaaggcgagcaaggacgacaagcatcccgagcacaagaagtggaagaagaagcgtggcaacgcgaaggtgttctccttccagcgtgcgtacggtgcaggcgtggcgaagatcgctgcgaccaccggcatgtcggaggacgaagtcgaggcgctggtgcgcggtgaggccgagcgttacccggagctgggtgcgtacatcgaccgcatggtcgaggccatcaagcgcaaccgcgtgagcaccaaccgcttcgttccgcacccggacgcaggtcgccagggtgtgcccgccgggctgacctgtcagctgggccggtctcactggaccacgccggacggcaagatgtattccttcagcgagtcgccgtccccggtgttcatcgccaacaagcccgcgagcaagggcggctgcgcgcagtcgttctcgcccacggaaatcaagaactacccgatgcagggcaccggtggtgaatgggccaaggctgcgatgtacgtcagcctgcgcgccttctaccgcaagtacgttaccgaaccgaaggaatggttgggccgtgcgctgctcgtgaatcaggtgcacgatgccgtgtacgtggatagccacggcgacatcgcaacaaaggccgctgctctgctgcacgcctcgatgctggaagcgtcggtgtacatggagtggtggttcaactggccgctgcctctcggcgtcccgtgcgaaaccaagatgggcgacaacatgatggaggagaagaaccctcccgcagagttcgccggtctggtcatcgagtaccgatcgtcgatccgcaaggacttcgtaggtaatcacaacccgtcgtttgaacaaggagaactacacgcatgagtcttgacgcactgttgaacaaggtcgccacccagggcaaggatcagtcggtcgccagtggtggcagcttcgactacaccccgcccgctgccggtgtgaccaccgcccgcatcgtcgggtactacgaacagggcaagcacgagttcgagttcgaaggcaagaagaagacgcaggacgaagtcgccatcgtgttcgagctgaccggcaagcagcacccgcacatcgaaaccgacaacggcccggtgccggtgcgcatgaccctgacgctgggcctgtccaccaacgagaaggcgcactacttcaagatcttcagccgcctgcgcaccgaagagcgccacttcgtgcagctgctgggccagggtgtgctgctggaggtcgtccacaagaagggcaagaaggacccgaccaaggtgttcgccgaaatcgacaaggcttcgatccgcaagccgatcatgccggtgccggagatggagagcggtatcccgaccggcaagttcgtggacaccgtgatcccggtaccgcagcagatcaccccgctgggtgcgttcatgtgggacttcgccgacgccgagatgtgggacagcatcttcatcgaaggcgagtatccggagcgcaaggacgagaagaccggcaaggtcatcgccgaagcgcgcagcaagaaccgcatccagctgaagatcgcctcggcgctgaacttcaagggcctgccctgctacgactacgccgccgccaagctgtcgggcagcacgacggtcaccaaggaaggcatcgacgccctggacgaagtggtcggcgacgtggcgcaagccccggccgccgcaccggccgaggacaagccgccgttcccgatggacggtaacgacccgatggcgggcatcgcctgatggacctgagcgctctcatggctgcggctggtgagcgctccccgatgccggtgcaggtggtacgtcagcacaacccgcgcgtgatcgctcacgttgacggggactacatggcgtacttcgcggctggtagcgagaactgctcggcgggggatgcacggcgcaacgtgctctcccgctgcgcacagctgaagcacatcagcggagcgggcaagatcgtgatgcacctgacgcatgccgcgtctaccaagggtgatcgcttcctcgctgctaccacgcagccgtatcagggtcagcgccaagcaggccgcaagcccaacaactgggcgttccttcgtgagtggatggagacctacgagggcgacgctttcactcccaaaatctggctgactcgcgaggccgacgacggcatcgcatacgtcaacgagggtgcagcattgcaccacaacgtactgcacgtggtgcacagcgccgacaaggacatgcgaatgttctgtggcgttcacgtagactgggatggctacggtatcacggaggttccgctcggcgcttacgacatcgtgggcgagaacggattgcagtacggtcacaagtggttctggatgcagatgctccacggcgacagcgccgacaacataccgggtctgccgaaggttggcaaggtcaaggcggagcagctgcttctcgacacgaaggacaacctcgaagcggtgcagctggtgagtggcaagtacagcgaggtgctcggcgccgactggcgcaagaccttcgccgagcaggccgtgctcctgtggatgcggacggatcgcgacgctgaactgctggacgtgctgaagctcgacgtgttcgggccgcagctgaagcaagcattctacgacctcgccgaggacgtgaacgagaagcgcgcaatcctggaggcatacaaagcatgagaacgaagtggacaataacgtgggcgtggatcaagtacacgcccaatctccggtgggaaaccctgaagtcacggtaccaatcgtggcgttccgttatcggggactacccatggtgaagcgactcactgcaacgcaagtcaagctgctgcgcatcaagttcgcagcggagcagggcaaccgatgctgtctctgtcaggggcagttcggcccgaaggctccgctcgatcctgtcctggaccacgaccacaagaccggcgctgtgcgcggggtgctccatcgcggatgcaactcgctgctcggcaaggtcgagaacaacgcaggccggtacggcgtgcgcgatgtgttcgcattctgtgcgggcatccccaactacctgcggtcccacctaaccaacatcacggggtacctgcatcctacctacaagaccgacgacgagaagcgcatcgctcgcaatgcgaaagcgcgaaagcgtcgggcactcaacaaggagacaccgtgaccctcacacagttcattcgccgagcaccgaagcgcggcccgaagattctctgcctcgacatcgagacgttccccatcgagttctacggctgggggatgttcaacaacaacttcagcgtcaagcagatcaagcgcgactggtcgctgatgtcgttcgcttgcgaatggctggacgatgaggagtcgttctacatggaccagcgcaacgtgcgggacgtgttcgatgatcgcaagcagggcaaggcgctgtggcacctgctcaacgccgccgacttcgtgctcgctcgcaacggcaagaagttcgatctgcgcaagatcaaggcgcgcctcgccatcctcggctttccgcctgtgtcgcctgtgcaggtgatcgatccgctgctgctgaaccgcgccgagttcgcgttcacctcgcagaagttggagtacaccaccggcgtgatcgtgccggagctgcgcaagtacgaccaccacaacttccccggcttcgacctgtgggtggcctgcatgcagaacctgcccggcgcgtgggacgagtgcgaagcgtacaaccgcatcgacgtgaagtccatgaagttggagtacaagaagctgcgcggctggtactcgcagcatccgaacgtcgccgtgtactacaaggccgatggcagcgagcaccgctgcaacaagtgcggctgcaaggaaatgatcccgcaggatgatccggcccgcacgcaggtcggcacgtacctcctgcttcagtgcaccatgtgcgatggcttcagtcgtgggcgcaagctgacgaccagtgccgaagcgcgcaagcacatcaccgtcccagcataaggagaagcgcatgagacttaccgacgttcgccacggcgaccgcgttcgctacaccggcactgccccgggcctcgtcggtaagtccggcgtggttcgttcgatcagtgcagcagatgttggtgttctgttcgacggccagctgtacgactccgcgatcaagccccagttcctcactcgcctgatgagcgtgggaggtatcaccaccacacacagggaggttccattgcccgagcaactgaactaccgtaacgaggacgagcgcacgtcgtccgaccggggcgtcggcctgaaggatgacggcggcaagccgcaggcgcggctgctgtacgaaggcgtgccgcgtgccctggcccgtgtcatcgacaccctgaccttcggtgcgcagaagtacaaggcgcactcgtggcagttcgtcgagaaggcggccgaacgctatcaggatgcgagctaccgccacgacaacaagcgctgcctcggcgagaagctggacccggagacgggcgtccaccaccgggcacaccacatcatcaacgagctgttcctgttggagctggaactgcgcgaggaggagaagggttgacggcctgcgtccgctgcggccaagtgcatcggtacgtcccacatgaggccgagtgggcgcgcttcgtagaggagcaccgtacccgcaagcaattcgatgtcgagtgggcgaactcactccaccatcgcacataccctgacgacgccttctgcatcctcgtgatgaaggggcgcgcaggtttcgttccattcccgtcgaaggagaactgaatgctctacaagaaccagaccgccatgctcatcaagtcctacgagaacaccgtggcgtggggcgagagcgccgaccacgaggaggcgttgcagaacgcggtcaaggcgggcttcccgaatctgccggaagcagaccaggccgaactgtacacccgcatcgccgaccagtgggaaggctaccgtggttcgctcgccccgcgcaagctgtggatcggcaccatcgtcaaccagttcatgtcgtcccgcatcgctcggttcaacgccgcgctgggtgacggcaccgctgcaaccgccaccaccgccgtaaagaagaagggtgcgaaatgagctacatcgtccacaaggcagtcgagcaggacaaggtaaagaagaagctgcggcccaccgaggagcagctgcgcaccgagtacatcgcccagccgaagtacgacgggtgcaacatggtcgccatcaagcgcgggcactgggtccccgccgtggacaagggcatgcacgccatcaaggtgaacgactggcagatgcaggcggtggatcgtggcgtggttgacctgttctcccgcaccggggagcaggtggtcagcgcgcaccacatcgagaacgccctcgcagcggcgccgttcttcccggtcggcgtgtacttcggggaatactggcacccgacaatcgaccagcccaccgtcagcggcatgttccgcaagaaggacggcacgcagtacaccgagccgatgttcgtggtgttcgacttcgtgacgctggaagagtgggagcagggctacagcgacctcgtgtatcaggagcgcgtcagtcgtctgccgatcctggggcactccatccccgaaggcgcggcgcccgtgttctacgcggagtcgcagggcttcctgatcgaccaagacatgggcagcatggaagcggcgaagctgctgtgcgagggcggcgcgtacgatggcctgatcctgcgcaagccgagcggcaagtggatgaagggcgacaagggtacgaacggcgaagtcatcaaggtcaagccgaccctgacgctggacctgcgtgtggtcaagatcaacatggctaccggcgagaagacggggcgcgatgtgtggaccgtggtcgttgacctcggcgatggcaagacgcaggaggtcggcagcggcgtgccgcacgattccgctgcgctgccggtcgagggagacatcgtggagatcgaggccatgtccttcagcaagtacggtctgctgcgcgagccgcgctacaagggcatccgccacgacaagacggaggccgacctgtgatcatcgacctgggcgagttcaagcgcaagagcggggatatgacgagcatccgcgccaccgtggacggcgaggtgttcgagttgaatcgggtgttcgatccaacctacgaggaacacttccgggagcacatccagcgcggcatgttcctggaattgatggagcatatctacgacaaattcatgaaggagtaaacgatgctttcgcaagtggaactcgaactggaaacctacgccttcggtaaggagcgcatggagaagtccatcgcccgtaacgaggagaagggcggcgcggacaacaacccttacgcccaagcagtgtaccgccggttcgtgcttccgcttgcggagcgcatccgcgcagacatcgactccccgcgcatcggacgtgcccaggcccacgtgccacttctgcgcgccaagtacgatccggagcgtcagaacaagcgtgggcagcccgtgagcgccgaggaacaagcccgcgagtggtacgaggctgtggccttcgtcgccgttcgcggtgcccttaccacctgcatgcgtgacaagcacggcgaaggtagcgaccgagacgtgctgaagagcgttggcaccaacgtgtaccacgagtacctgttgacgcagttcgccgacgctaagccgaccctgttctaccacctgatgaacgacatggaccgcaagctctctgtcaacgagaaccaccgcatgacggtgatgaagatgcagggtcgcaagaacggcgtcgagttcgtggagtgggggcaggcgcagcgcgatcaggtcggtgcctacctgacggatcagctgtcgcagctgggtatgctggaaatcggcgtgctcaacaacacgcagtacaaggacggtcggcgtacgcacaagaccgaggtgaagataatgctgactcctgcggtgtcctcgctggtgcagcagatcagcgacttcgtgatcgaggctactccgttcttcctgccgtgcgtcgagccgccgcgtgactgggtagcgattgacgatggtggtttccacacccaggagatgcgccgcctcaacccgtggatggtcaagacgtatgcacagacccgcgacgactaccgtgatgcgggactgaacaacgagatgcgggcgatcaacgcattgcagcgcgtgccgtggcgcatcaacaagcgcttgatggaggccgtgtccagcatcgccaaggtgcacgacatggacgaaatcattgcgcagggtgaactgcccaagccgcgcaagccggactggctgacgaaggacatgaccaaggaaacgatgtcgcaccagcaggagctggacttcaagaagtggaagcgcgacatggcgaactggcataccgacgagcgtctgcgccagaacaagggcaatcgattctacaacgcaatgaaggtggcgcgcaagttcgccgagtacccgagcatctacttcgtgtacttcgcagacttccgtggccgcaagtacgttcagaccaccggcgtctcgccgcagggttcggacttgcagaaggcactcttggagttcgccgaaggcaagccgctgctgacgaaggacgcgcaggattggttctgcatcacaggagcaaaccgatggggttacgacaaggcgtcgctgccggaccgagtgaagtgggtgcgcgagcatcacgaccagatcatggccttcgctgcggacccggtgaacaacgacgagtggaagacggccgacaagccgttgcagtttctgagctggtgcatggagtacgagcagtggcaaatattcggggatcgcttcctgagccgcatcgcagtcgggatggatggttcgtgcaatgggcttcagaacttctcggcgatgctgcgcgacgcagccggcggggtggcgacgaacctgatcccggcgctgctgccgaatgacatctaccagatggtcgcagaccgcgtgactgcgatcctactggccgagcaggaagacgaggcagggttccgcaccctgtggctcgaccacggcctgacgcgctccctggtgaagcgcagcgtgatgaccctgccgtacggctcgaagaagtccagctgggcagacttcatcgtggacgactacctgaaggaggggaagttccccggcctcgacaaggcgctccacatgcccgctgcgcgcttcctgagcatccgcatgggggaggccatcgccgacaccgtggtggccgctgcgggcgcaatggcgtggttgcagaaggggtccaccgcgatcctcaaccagggctacgaccgcatcaagtggatcaccccgtccggcttcccagtcacgcaggtgtactgggaatccgacgagcaccggatcaacaccaagctgtgcggcaacgccaagctgtcgatccgcaagagcaccgacgaggtgaagaagtcccggcaccgcaacggcatcgccccgaacttcgtgcacagcctggacgccagccacctgaccctggtggtcaacgccgccaaggccgagggcatcgacgccttcgccatgatccacgacgacttcggcacccacgccgccgacagcgcggccctgtaccgcatcatccgggaggtgttcgtgggcatgtacgagcggcacgacgtgctctcggccttccactcggcctacccgttcctgccggagccgccgccgatgggcgatctcgacctgcgccaagtccttgattctccgtacttcttcagctgacggagtttcagtacacctacagctgagagggtggttggagcggccgcgaaggtaagcggaaccggtgccacccttttggtacacctacagctatgaggagacaccgtggccgaagacgccaaagtgaaagtcctgatgacgctgcacccgaaccagcttgccgccgtgcggcgactgtccgggctgtcgctgtccgtcaactcgaataccacgcccttggaggcaggtatgcagttggggatggctcgcgtcctgaacatcctacaggagggtttcaccgttgattcctccctacagaacaccaacgacgggtgatagtgagcagatcaaggcggctttaacggccgctttgtatctgtcctctagagaagatagtaaagtagacaatagagaatcctctgtaagctacaactgtgatgatcctgattatacagtagctctgataactcagaacttagtagatgcagtaatcatagatgaagcttatctactatgctttgccattgtcacaccgtggtattccaagaaccgtactacgttcgttgagaacatggtgctgcgaattgggccgggcagttccttcgaccggtacatagccgtgatggaacacttggctgacatcaaccactgcgactcactgagtgcaggtggcgcactagctcggaactcccgagcactcacacggatgtatgcacgctacggctacctgctggaacgtcatgctccccaattcaccaagcgaaggagttaacctatgggtagcatccttggtggtggctctgcgaagaaggctgcgctgaagcaagcggcggctatcgacaagcagaccaacctccaaacccaatccacgaactaccagatccaggcgatggccgatcagatggctcaggcagctgcacagcaggccgcatccgagtacgccgagaagttgctgagtgcccctgtcgataccgtcgatgtgcggctgggtacttccgacctcgacttgcagaccgccgacttgatcggccgacgcaagaccgcccgctccgcctacacccgacccgtgaccacgaccgcagcttcccggctgacgactgtggccgggtcggacctgttgtgaggtgagcatggaccactcgatccaaaccgcgcatcgccagttcgaggcgtacgacaacaagcggaacggcatcatgtaccggctcgaacgatattcgagctggactgtgcccaagctgttccctcgcaagaaccgcgaccaggacaccgagccgctgagccacgggttccagtccctcggcgcgcaggcagtgaaccatctggcgaacaagctgatgatgtcgctgttcgcaccatcccgaccattcttccggttggagatgaagcgcaaggcgcgggaggcagcgcaggatcaaggcctcgacttgcaggctatgcaggcgatgcttgcgaaagccgagcaggatgcgagtctcgaactcgacaagcgctcgatccgctcccgactgtacgacctgctgaagatgctgatcgtgctgggcaacgccctgatggtgttggagaaggacacgatccgcgtgctcaacatgcggcactacgtggtcaagcgcacccgcaccggtgaagtctacgaactgatcatccgggagaaggtgcacaagacccagctggaacccgcagcactcgctgccattgtcgcacacccggacttcaagccggatgatgacggcatggtgtgggagtacaagtggctcaagctggaccaccagaccggcaagtacaacgaagacgtgtggatttgcaactgcaagctgcccgccaacttctcctcgtcctactccgcagacaagctgccctaccgggcggtgagctgggacttggccgcaggcgacgactacggctccggcttggtcgaggactacgaggcagacttccagtcgctctcgatgctgtccgaggccgcagtgcagggagcgatcctcgcatctgagttccggtggctggtgaacccggcaggccagacctccgtcgaggacttcatggcatcgcccaacggcgcggccatccccggcatgaagggtgacatcgagctgatcaacgcaggcgtcgatggcgtgctgcaaaccaaccaagcaatccagtccacctacatcaaccgcatcggcgcaggcttcctgttgcagacggcggtgacccgtcaggcggaacgtgtgaccgcgcaggaaatccgcatggtcgccgaagaactggaaggcgggctgggtggcggctactcccgcatcgctgcggacgtgcaggtgcctgtcgccttttgggtgatgaacctcacgggccgcgacatccggggcaaggacttggagcctgtcatcatcaccggcttggccgcgctctcccgaacgggtgaccgtgaccggctgttggagttcggcagcaacctcgccaacgtcctgtcgctaccgccacagatcctcgaacgactgaagctgtccgcgtggatcgccgacctcgccgccgctggtggtttggacccgaacgtctacgtgctgactgaggccgagtacggccagatgatgcagcagcgtgcgcagcaacagctggtcatgcagaacgcatcgcagcagatcgacaacgccaacaacatggagacacagacacaatgagttccaatgcacctccgggcggtggtcccggcgcaaccgtgatcgcaacctcgcaaggcaaccagaccgcaccggcagcccaggctccggccgacgacaagctgctgaccggcggccaacccgcacaggcgcagcccgcagtccccgcagcacctccggcggttgacgcgctgagcctcgaacccaccgcgcctgcacagaccaccgctccggcggccgctgcgccaactgctgtgtcgattccggactacggcgacaacggcctgaacatcgcggccgaatacttcgtcaacaccgtcggcctcgacatcgacagccgcgaactgaccgaagcagcgaagggcaacttcgccctgctggaagccaagctggaagtcctgggcgacaaggccaagggttccgcaccgatcctcgctctggcgaaggaaagcatcgctcgcgtcaccgccgctgcaaccgcagcgcacagcgcgaacgttgctgctgtccacgaagccgtgggtggcgcagagaactgggctgcgatccagcagttcgcacgggccaacctgcccgccgaccaactgaagcaggcaggcgaagcgctgtcggccggtggcttcggcgcacaggcgaccgcgcgctacctgatggctctggcccaggccaaccccgcgacgaccgtcaagggcgcaccggctaccaacgccgccgctcctgccgcgtcgatcaacggcgtcgctcctatcacgaaggagcagtaccgcgctgagtaccgcaagctggttgccgagaagggcatccgtggtgcggcccactccgaagaactgcgtgcactcaacgcgcgcgtcatccactaagacccaaggagcaacataaagcatgagcaccatcttcccgaccgtcaccgttctgccgaaccaggtcaaccagtccggcaacgagaacgccctgatcctcgaacagttcaccggcgacgtcgagcacacctacgtgtccagctcggtgctggaaaagttcttcccgcgcaagcaggtgaagggtaccaacaccctgaccaagaaggccatcggccgcaccaagctccagaagctgaagcgcggtgacgcgccggacggcaccccggtggacttcagcaaggcgtcggtgaccgtcgataccatgctgctgtcgcgtcactccatctggcagctcgacgagatcttcaccgacatcgacacccgcaaggaaatcgccatcgagcagggccaggagatcgccgagttcgtggacctgaccatcagcatcgctgcggcgaaggccgcgtcggccacccagtccatcttcacccgcaacggccgtgcgccggaaggccacttcggtgccacccaggtgaccctggcggcggcgggcgacgagaacgatccggccaaggtgtacgcggccatcggcaagctgttctctcgcatggaagaggagaagaaggtcaagccgcagcgcgacggcgtcgtcctgatcgtgcgcccggcgatcttctacctgttgcagcaggccgagcagatcagcaacggcgagtacctgacctcggacggcaacaagctgaccggtatcccgaccttccacggctggggcgtcccggtgctgtcgagcgagaacctcccgaacaccgtcatctcgggtcacctgctgtcgaacgacgacaacgacgacttctacgacggcgacttcagcaccctggtcgctgtggccgtgtcgccgaaggccctgatgatcgccgaagcgctgccgttgcagtcctcggtgtggtggagcgacgcctcgaagtgcttcttcgtggactcgtggatgtccttcgccgtcggcctggatcgcgtcgagaacgcgggccgcatcgacaaggctgcctaacccgctgggcgcggtccctgaatccttcgggtaactcaaaccgcgccttgccttccaccaacacaggagcaccatcatggtctttgaccgaccgttcgaaatttccaaccgtgtcgtcgccgcaactggcgtggccggtctgcccgccaactccgtgggcaccgtcgtcggcgtccactacaacgccatcggcacggcctgggtcgtgcgtgtccgcttcgtcgatgacgaaaacggctcgcaggacgtggagtacgcaccggcctcgctggccctggctgcgaactaagcaacatcctggcaggggcgctccggcgtctctgccttgttcctctcaggagacaccatggcattcatcaccaagctcgacatcgtgaacgcctgcatcaagacgatgggcgagacgaagctcaacacgctggaagaggaccacgtctacaaggacgacgcagttgacctgatcgaccgcgtgcaccgcgacgtgtcgtcgctcgcgctgtggttcaacaccgaatgggtggagctgaagccgcaggcaacgagcaagtacatcatggtccccacggacgtgctgaagctggactgcaacccgagccgcttcggccacgtggtgcagcgcggacgccgactgtacgaccgcaagcgcaatacctacgagttcgatcacagcgtgcaggccaagctggtccggctgcttgacttcgacgacctgccctacgaggtgcagatgttcgtgcgggacgacagcgtgctgcgcttccagtccgacttcgatggcgacaacaccaagtacgccaagatccagcagcagcgcaacgactcgtggatcaacctgaaggccgagcacatccggcagatcaaggcgaacccgctgttcgcgcgcgcatccgtggacgttctgcgtcagcggtacttcaactacagcggacacccgtggcatagccacgtcactttccccggctaaggaggcatcatggcaaaggcaggcggaacctatcccgacatcctacagggtgtcagtcagaaaccggcgcatcgtcgtcgggcgggtcagacgcacgagcagatcaacgtgctgtccgatccggtgaatggcctcgtgcgccgtcgcggtacgcggttcgctgctgcccaagccgttgtcacctcggccgaactgcgcaacatggacgtgttcgatttcatgcaggagggcaaggagtacgcgctgctgtatcggcgcgacgcctcgtcgtccagcagtgcgacgttcgcgttcctctacaacaagacggacgaggcgttcatcccgttggtctacgagaacagcacgtgggtcaacacgttggtcagcggcggcgcgtcctctctcgcggccatcggcagctacgtctacatcgcgggcaacaccacgatcccctcggccaccagcaccaacgtgtggcaggagcagacgaacatccagcgcctcgccgcgtgggtgcgcaccggcaagtacaacaccacgtacacggtgaacctgacgcgcacggacaacacggtgctgacggtgacgttcaagacggtgaccgcgtcgtaccccggcacgctcgacacgagcgacatcccgttctacctgcccggcggcacggagccggacgcggcgtaccagaagcacgtcaacgaccgagtgaacgagtacaactccgcggtcaacgagtggatcgtgaccagcgccgagcagacgcgcccggagtacatcgcggagaagctgtcggatttgctggtggacgcaggagtatcttcgacgtacatcaagggcggtatcgtcattgacgacgaccagttcaaggacatcacggttgacgacgagggcgacggcacgaccttctacgccgcagggcaggagattaccgacgcgacctacgctgtcaagttccactggcacggcaagatcatccgcgtgcgcccaagcggtgcaggtgctgacgagacgtactacctgcgcgccgagttggagaacggcgagacttctggctacggttcggtggattggtacgaagcgcctggcgtggagtgcaccatcgacaacctcgtgtcgcagctgtacatctacaacggtgtgggctacatcgcacgcaacggtgcgggcctcacgtccctggctccgggcagcggcgcacacccggcttacggttcgcgcgtcgcaggcgatggtctgacctcgccgatcccgtggttcgtcggcaagccgatcacgatgctgtccgtcttccaagaccggctgatcgttggcgcgcagaactacgtcaatgcgtcccgctcggcggactacctgaacttctggcgcggctctgccgtaaccatcgaagacagcgaccccatcgaaatcttcgcgcacggtagcgagggcgacgtgctccggcacggtacgctctacaacggcaacctcgtgatcttcggtgaccggcagcagtacggcatcagcggcgactcggtgttcagtccgaagaacccgctcatcaaggcgttcagtgcgaacaaggattcggtggacgcaaaggcgcagacctcgggcaactacatcttctacgcgcagtacggcagcgaaggtacgagcctgcaccagatgcgcgtcggcgcactcaacgggcagcagacggttacggacgagatgtccaacgagctggactcgtggctgtcgggcacgccgttgcagatcaccgcactcaccgcaccgaacctcgtgatgttccgcacgcgagagcacccgcaggacttctacctgtaccggtacgaggacaacaagaacaacgggcagcgcatcgtggacgcttggtcgaagttccagtaccacccggcgctgggcgaaatcatcggcatcagcagctacaagaagaacggcctcgtgttcaccgcgcgcggatcgctggtggcgtgcgacgtgttcgatccgaagggcgagccggactcgcatgcgtgcctcgatagctgggcgcgtttcggtacacctacaggcgtactgaccgcgagcgcgagcatcgccgtcaacaagactagcccgtacttcctgctgggttgtccctacgctcaggcgtccgacttccttacccagttcgatgacctcgacgctgatgcgttggagtatggcgtggtgtccgaggcgctggtgattccgaccaatccgttccctcgggaccagaacgggcaggctgtgctcgacggccgcatgtcgctgaacaaggtgacggtggacgtggaggacacggcgggcatgctcgcttcggttaccacccgcaacgggagcatgaccaccactgacttcgagggccgcatcctcggcgactccgacaacctgatcgcgcggcaaccggtgtaccgggggcagctgaacatcagcgtcgggcgcgaagtgcgcgagtgcacctacgagattcgcagcaaggattggctcccgctccgggtgaccggcctcagctggacgggtcagactttcaacaatgtacggagggttagctaatgggttcggttaatacgatcctgcaagcgaacaacaccacccgcatcgctcgtgcgaactaccgtgcagccgttgcgcagaccgacaacacgaaccggagcgaggtcgccaagactggcttctcggatttcatgcggtccctgaagaacaacgcccagctggacgccgccgccaaggagtacaactccaacatggaggcgctgtccgaggagctgcgtgcacgccaaggggctgggcttaactcccagctccaactggcgaatgctcgcggtgcgttgcaggcgcaggccggtgctgtcggtgtcggcggctcgtccgcagacctgatggattccatggtgcgcttgcaagcggagatggacaaggagacgcaggacaacgcggtggcactactcgcctctcgcggtgcatcgcagacggcgcaggtgatggcgcgtgcgtggcacgggatggacatgagccgcacgttcggccagttcgactacgcgcagcatatcgagccgaaggcaatgaagcgtcgcttgggcaagctgatcggcgtggccgtggctacctacttcggcgggccgatggcaggcgaggccgtggcggacttcgcagtcggcacgtggcaggcggacaacggcaacttccaaggtatgtcgcagtccttcaacaacgcagcacagaacgggttgcaggcgtggcagcagtccaacgagcgcggcggcaagtcgtgggcgtctactaccttcgggtacaacgacggcaccggcaagcagtccgtgacaggggcgaaggtcaccggcaacttcggcaacaactacgacaacttctccaccactacgtccggcctcggctggttcgatagcggaagcggaggcaactcaggaggtgcatggtaatggctgacatcggcacggttaccttcaacacgcagtccgcattgcagggtggcatcaacgccacccccgcactgtcgggcaacaccagcatccaaggcgctggtgtgaatcaggtcggccccgttcgctcggggtcggattggttcgagagcactggcggtatgacgatgccggacagcaacctgcccgagttcttgcaagaactggcctcgccgaacaccgccaagctcaagcagcagcagatgtgggacggcttcgttgccgcccgcgcgggcaagaccatggacgagatcgctgcgaccgagccgtggtacaagaagatcttcggcgacaccaactacgagatcggtgcgagcatgtacaacacgctctcgcaggtcaacgagatggagagcgacctgctgcggcgcatgccggagttgcgtcagctgccgcccgaggcgatggcgaaggagttcaacgaactcgccactgcccggatgaccggcaacggtttcgcggacacggtgttgcagaagaccttcatggatcgtgcgggttcgctgatggacctgcacacgaaggagcgcacggcgtggcagcagcaggagctggtgaaggcgcagtacgctgcgaactcgtcggcgtccaccggcttcaacgaactggcgaagcgcacggcgatgctcggcaccaaccgtcccatggacgagaaggccaccgaggcgttgacccaggcgcagctgtcgctgctcgacggcctgtcgccctcgcgctaccagacggacgagtcctacaagtccgcgatcacttccttctaccgtggcgctgcggatcgaggcgagttccacacgctgaagttcctcaacagcaagggcgtgctgaacgccatcgacccggacgggcagctggggatccagcagtacgtgaagcaggcgcaggatcggtaccgcgcggactggctcgacgccaacccggagcaggccgagaagatggcgctcgtctccatgtacgcatccgagggcatcggtgccaagccgtcccaggcgatgatcgaggaaatgaactccacctacgccgctgagactggcagcgacgcaccgctctactcgggcacgcagctcgcctcgatcatggcacagtccgcaggcgcacacatccgcgcccaggaagccgtcatcaaccagcgcaacgcggcggccaaggctgcactgacggaccagcagaagttggctgctcaggaggaggacatccgtggtggcatcgaggcgttcaagcgcggcacctacgcgcagacgatcaacattcccggcgtggacaaggagctgatcgaagccaacacggtccaggcgtggaacgacacgatggcgaagaacccgaaggtcgccatgtcgcagctggtgtggaacgccaacaccggacgcggcgccgtgctcaagggcgtggccgaccagttccagaccacggcgcgtgccgtgctgcgcgaccagccgaacacggcagcggctgcgctgtaccagcagtggaaggaacttaagcagaccaccgccgcacgcatcggcactgacgggcagcctgtgcagggccgactgaccggtgcgactaccgccgcgctgtacttcggagatagcgtcaacacgttcttcaacaagctgcaagcgttggagaatggcggcgtgaacttcgagcttgcctacgaggtggcccgtggcgaaatcaccaccgacgatcccacgaagttcgacgcggacagccgtaaggaatccgaggctactcaggctcgtgttactcaggctatcgcaaagctcaaccccaagtacctcggtatgttcggcaacaagcttggcgactctggccgcgctgcgtatgctcgcgccatcgtccgctcggtcaccgacaccggaggtctgctggacacttctgcggaaggcttgcaggctgcggctactcacgccaagctggcctacggtctggaagacgcgggcaagtacgcatgggagaacgggcgtgacgacgagggccgagtgatcggcggcgtcggtgcgtggctgggcttcatggacacgaaggagacgggaccggctatcgagaaggctatcgacgcagcactgcgccgggtcaacatcgagccgaccaccggcctgaaggccgacgtgttccgcatgaaggacagcgagactggcgagcccgtgctgtacgtcaacgctgttggcgagaagggctggaaggttgtgccggtgtacgggcgcgacatcaaggccgagtacgagaagcacacgaaggagcagcgtaagttgcaggccccggtaccgcagggctacgttcgcatgaacgacggtacgattcagcagagcatttccatccaacccaaactgtaaggagatagacaatggcactcgatctttcggggctgacccaagaccagcagattgccaaggctgccgcttatgcgggagtgccggagtccgtcgtacgtggtcagtggcgagtagagtccggcaacgggcgtgccgccaaggacgcggacggtattatccgcagcaaggcaggtgcgcggggtgacttccaagtcatgcccaccacgcaggcaacgtgggaagcgcgcaacggtcgcaagtacgacatgcgcaacttccaagacagcatcgagctgtacgccgacatcatgcgcgagaacatgcagctcgccaagggcgacgtaaccaaggctctgcgcatctaccagggcggcaccaacccgaagaactggggacaggagaacgcggcctatgcacccagcgtgctgggcggcgcctcggctcctgctgtgtcggcacagccgcgcagcctgagcaccacacaggcggacctcaacgctgcgtggcagggcaacccgaacatgcgcgaccgcacgtggtccggtgcgtccatcccggatgcatggaccggcgctcccatcgaaggccgcaacgccctggcgtcggctgcgaaggaacacatcggcaagattcgtgcgggcatcgccgagctgtcgatggggcagatcgcgcaggaaggtggcaccgccgagcaggccgtgggccgggcgcaggccgtccgtgcatcggatcaggttgtgccgtggtgggtgcgccaggaagtggactcgctgaacaccggcgcccgcaaggcgctgctggatcagaccgagcaagcactcgcacaggatcgtgcggacgaagagctgcgcaactcgctgacgttcctcgacaagtggggcgcggcgttcgatagcggcatcggtgctgcgatcagcaaccagtttgcacgcgaagaccagaacatccccgagggctggaagtacgacccgaaggaatgggagaagccgtggatgactgccgacgaactggaagacatccgcgacgcagcgtactcgccgaacgagttggcttacgtggccgaccggcagttcatgcggcgccactccatgcggatcaaggatcagcagaccggctggtcgagcttcggctacgacctcgtggcgggattcaccgatccgggcaactgggctatcggcggcgtcaccgctgcgggtgccaaggtgctgggcgttggttctgctgcgctggtggccgagggccgggtgggtgcgtcgctcgcatctgccgctgcggagaacgcggtcggttccgtcatcacggacgccgcactggtgagcctgggcgagcgccgcaacttcgcggacttcatgaccgacgcagcattcgcaaccaccatcggcaccgcgatgcacattccgggcgtgcgctcggcttcgcagattcgggacaaggccgccatcgacctgtccgcaggcaacgctgccgcttacggcgaagcgtggtcggctgacctgaaggcgcgcgctgtgtccgagctgggagagaacgcaaacccggtgatcatcaacaaccgagtccaccagcttgcgaagcaggaggccgtggactggctgcgcgccggtatggctgacgtgcctgacgacttccgcgtcttcgcacgccccgacgtgcaggagacgaccaccaccgcaggtaccaccggtacgctcgcgcgtgacgtggacaacgtggactccaccaccggccggtacaacgacaccgttggtgggcgggcggatcagcacgacccgctgttggagcgtgcatggaaagctgccggtatccagggcggcaaggtggacggcgtactgaagtacctcgaatccaacgcatccatcccggaggacatgcgggctatcgccaacgcgctgaagcgtggcggccgtctcgacagcgtcaagatcgtgccggagcaggagctggacaagtggttcgctggtgccaaccccggccccggcatgaagatcgcaggcgggtacaacccgagcctggatgccatggcgatgcggaactacaacccggagacggtgctgcacgagatgctgcacgccgctactctgcgtgagctgcgcagcaacactgcgttcgggcaggagatgcaagacctcctgacgcacatcaacagcagcctcgacagcgtggactctacgctgaccaccgccgcaatggagggccgtgtcaaccagccgcaggcgggattcctcgccaatacggacgagctgatttcctacggcctcacgaaccgcgctgtgcaggcggtgctgcgtcagatgcctgcgccaggaaacacccgaccgaatgcgtgggagtggctgaaggacaagatcgcgcgagtgatgggcctgaagaaccaggagtccgcgctcgaacggctgatgtctgtggtgggcgagaacgttggcgcggaggttcgggacacgcaggtgcagacccgccagactcgcggtatgctcgccaactcgatcttcaaatcgaaccgcgagcgcaaggcgttctaccagcgcacgggtctggacaagtccgtgagcgacgacgcgatgcgcgtgcaggttgctgaggtcatggctcgctccgagcgattcagtgcgaagtacggtatcgacgcagccaagctgtccaccatcatgcagcgcttcgggctggaagctacgagcacgaccctgatgtcgtcccagtcgccggtcgcgcgtatgctcgcggtcaccctgttggagaacccggagggtgcggcaggccgacacagcacggcggcgatggatcggcacggccggttcgagtcgttcatgggtacgcggccgcgtcagtgggaagcggcctaccggctgtggcgtgctgaggtgcgcggcatcggtgcggtcaaggacttcgccacgggctggaaggcacgtgcggacttcgagtacgcagtgaagctgtaccgcgagacccgcttcaacggcggtgacatcccggacgcgcacgaggcagtgaaggcgatggcccgagagatcgaccgtggctacaaccgcatggcggcagagcagcgcgcggccggtacggtgggcgcacagcgtctgccggaagaagacgtggagggctacgagtcccgcacgtggctgggcggcagcatcgctgctgctggtccggttcgccgcgagggtatccgccaggcgatgcgcgagcagttcgaggtgatgggtgagctgtacggggacgagttcctcgacaagttcgctaccaagtacctggagcgtatcgagcgcaaggctgcgggcatcatcgaagcgccgggtcaggtcttctcggagtcgcaggcggacacgctgcgtgacactctgcgggcgatgtcgctcaacgaggaggagatccagaaggtgatgggcaagtacagccgtggcggtgcgaagcacaccaagtcgcgtatcgacctggacgtgaccaagcagtacgaagacgccgatggcaagttccgtctgatggactacctcgacaaccgagtgatggacaactaccgcaagtacgcgggccgggttgctggtgacatcgccctggcgaagcacggcatcctcggcgacgcaggcatcaacgtggcgcgcgaagcaatgcgcctgaccggtgccaccgacgtggagctgaaggcgttcgagcaggtgatgtcggagttcctcggccgccctgtgggcaatggcgatccgaccgttctggcgaatgcgcgactgctaacctcggctatccagctgggcggcgcgggcatcaatcaggcggcggagtacagcaatggcctcgcggccgtgggtgctgctggtgtggctgacgcaatccgtatcgctccccgcatgcgtggcgaaatcatgcgcatcctgaagggcgaggagagtggcaaccagatcctcgacggcttcgagttcatcagcggtcggggcttcggcctcgccggttacgacctgcacatgttcaactcgctggacacgcaggcgtcgatgtacggcagcgagcgcgcaggcttcctcacctcgttggtgcagaaggcagcgcacacgaaccgcatcctctcggggcagcgggctgtgctcgccgtgcagcagcgtggcttcgcggaagtgctgatcgccaagggcgtgaagttccttcgcgacggtgccgaggctgacaccgccctgaaggacatgggcatcgacgacaacctgctgaaccgcctgcgggcgacgcaggacaaggtcgtgcgctggggcgcggacggcaagctggaagcagtggacccgcgcaacgtcgatggactggcggatcggcaggcatggctggcgttctacaacgcgatcaaccgtggcacctcgcagattcttcaggacaccttcatcggcgagacgggaaagtgggcgcacaacggctggctgaagatgctgttccagcaccgcacgttctcgctggtcgcgcagcagaagcagctgggccggtacgtgggcaactacggtgcgtggcagactgcgggcctgatcgctgcggcgatggccgtggctgcgccgctgcaagccctgcgcgtgctgtcccgtgtggccctgatgaacgatcaggagcgcgaggaggccatcgaccagaacatcctgtcgcccctggcgctgggcaaggccacgctgaactacgtgtcggcgacgggcatgctcaacgacgtgctggacgttggcaccggtgtggccggcgggtggtacgaatacgccaccgacacccagggtccgacgtggctgaagcagttggccggcgggcagttcggtaaccgcaaggaggtgatcggcgggcagttcgcgccgtctctaggcgtcatcaacgacttcgcccagggcatcgccggcaagccggagaacctggcggacgtcatccccggcggtcgcctgcccatggtgatcccgctgctgaagggcgcggccagccagtggaaggaggagtgagaatcagggccaaggacggcccacccttttggtacacctacagctaataggaggcagcatggcagttccagacccgcagctgcgctacgcgacagacgtgttcgacgccgatggcgtgaccactgactggcagatcagctttaccggtggctacatcaacccgtcccacgtgtacgccatgagcggactgttggacgaagagacccagctgctgaccgatcggaccccgcacaccgtggaagtcctgagcgaggacgatgacgctagtaccgtccgagtctcgcctgccgtcgccgctgggcgtaagctctacatctaccgcagcactccggtgcagcagatgctcgttgactacgttaacggtagcatcatcagcaagaccaaccttaacctcagcaacgaccagctcctgaagatcatccaggaaatgttcgactcgctcaacatcgccacccttagcatcgaccagcaggtcggcgtgatcgtggacctgaacgagatcatccagaacatctacaagcaggtcaccgagttgctggccgctggcggcatcgtgtctgtcaccccgcgcgtctggtccggttcatggaccggcgaccaggccggcgacaccgacttcgacatggtgggcgcggacgtgtccggcgccggcttctacgacgtgtacgtcaacggcatcggcatgcagccggacgtggactatcaggtcaccctggcggacggtaccgatcccagcttcatccgcttcgccacggttcccgccgaggggagcatctggttcgccgtgcttcgtggttacgccaagccctacaccgggccgccgccgatcaccgctgcgagccttcgggtgccgatcatcccggcagcaggcccgacctactacgccgacaaggctaccgagtacggactcgtgcgctgcacgtatgccggaggctgcaccgtcaacatcaacctgatccccacagtgggcaacggtgagacgaagctcgcccctggcagctacttcagcgtccagcagaaggcgggtccggtggtcatcaccggcgatgcgggtgtgaccctggaagtaccggtcggatgcaccgccgcaactcgcggcaccaactccgtcgtcacggcaacgtgcatcgacggcgacaccaacacgtggttgctttcgggcgacttggctaaggagtaagcatggctaatcacttcaggctgtacggccgaccgctgatggcggacgaggttgtagatggcctgtcggtgacgggcgtgctggaagggtacacggcgggcgaggcttacacgtctcgcctgtccatcaacaacccagtcggccgctgcaccgtggaggtcatcgaatcgacgctccctgcgggcgcggtagtccgagtggacaacatcaccaaggaagtcgtcgtcaagtgggcggctttcactgaagtcctggacgaggaaaccctcgtgcctaacggcgacttcgaggcgggcgacgacggaacgtgggtgcctggcggcgcggagaatggcgagggctggtcgattggcactggctccggctacgacaccgacggcggcgcatacagcgcgcgcttcgccaacatcaagacgagcggcagcgacctgctcaacccgctgattcccgccaaggtcaacgactacatccgctgcaccgccgaagtcaaccagggcgcaagctcctcgggtaaggcaggtgcacgtgtgtcgatcatctaccggagggaggatgggacggagctgcaacgcaactccggcaacctcgtgaagtccggcagcggcggcgcttggcaccagtcggtcgccgagggagccgcacccaaggacacgaagtacgtgcagattatgctgtctgcattccgcagcaagcagaacaagccgctgtgggtggacaacgtcaagtggaaccacaagtacgtgctggggcagaacgacgacagttcctacttcctgagcatcaaggtcaccgacgggttgaaccgcgtggcctactggtccggccgtatcgaggagcagggcatctacgttacgtcgaagctctacagcttctaccagacggagtctttcctcggcaccagtgggttcgccgggtactccaacagggacatgcagactcccttggaacagttcctctgcggctcatccttcgttggctgggaaattcgcagctcgcgtatagaggtggacgccggggcagaatcgttctcctgcaccagctcgctggtcggctgggagattaagagcatccgaaaggagtacgctgtagaaacccccgagtctgttcgtgttcagtcctcgttccattccttcaacctgaagcagcatccggtagtgaaccagccgcccgacgcggccgcacttgtccggtctggcttcgtctcatggagtttcgcatgatccaaaacaagctcggagttgccgggttcttcaccattagcaaaggcaagtcgctcgactcgctgaagacggtggcggactggcaacagaacctcattaccaacagcggcatggatgcactcggcggcaccggctacccgatcagcctctacgaaatgatcagctacctcgcagttggtagcggtagcgcgactccggcgttctccgacaccgcgctgggtgcggaagttgcgcaggtcggttacactacccaaaacaacggcggcactaccaccgcaccgtactatgcgtacgcccggatgcagttccagttcgcggcaggtacggcaaccggcgtgctctccgagctgggtgctaagcgctacaacaacagcaccggcacgtacatcctcaccacccacgcgcttattcgggactcgggtggtagccccaccaccatcaccgtgctcgcagacgagatcctcgtggtcacctacgagcttcgcctttacgtggacaccacaccggtggttaccacccagacgatcaagggcgtaagcaccactgtgacctgcaagcctatcgcgcttagcaccggcgccatccagggagccggcgccgtcgcttggaccaactacgtgtggggttgctactacttcatcggcggcaccggagacggtactggcgcaatcaccgacgccacccctccggggaccaacgtcagctactcggatttgtctacccagcatatcgactatgtgcccggtacttactaccgcgacgtcgtctgtcggctctcgatcaacaacgttccggatggccctatcaccgcagcgatggggatgtcagggtgcatcccgttccaggtcgggttcagtccgggcgtcaccaagaccggatcggaaacggccaacctgcgcatgcgggtttcgtggagccggtacacgccatgatccctactgtctcccaaagcatccaacgtggtgactgggtagagcagcagaatcggcgcacccgcccgctcatcgacttcgagcagggcgggctggtactcaacgcatcagtggataacctccaagctgcgctgtggaccgccgagagtgacggcagcagcgtcgtcgtttaccgcgacggcgttgccccggtcaccgtgctgacagactccggcatcacgcagatcgcactggcattcgaccagaccatgcggccgcacatcgcctacatggcgggtggcgcctgcaagttctactggtacgacacggtggcaggctcgatgcagaccatggtgatccccggcgcaaccacgccgcgcctgtgcctggacgagaagcgagcgatgttctccactcagagcgacgtgctactgtcgtacaagaacgggagcaacctgtgcgtccgcgcgcagcgagagcgcttcgcaaccgaacacgtgatcgccaccggaatccccggtgagctagtcgcggttggcatgaacaacgtcaaccgcctgcaatggaaactcgtcggcaaccccgacgactggccctaaacctacaggagaacagcatgaccccgccgagtgtggtcaatgaggtcgtccgaacctcgccgcttacgctcggcgcggtctacctcaacttcatcagcacgtatggtgctgccatcgtaactacgctcgccatcatgtacgctgtcgctcagttctactggcgcgcgcgcgagcaccgcaagatcatgggagggaatgatgtcgaacccagcaagtgagggcgcgctcggcgcactccacgaactcgttgccgtggtactgaaggagcgcctcgccaacggcgagctgtgcaccgcagcggacatcaatgccgcgatcaagttcctgaaggacaacaacatcacggctacgcgcgaggccaacaaggcgctcggcgaactggaagacgaactcggcaagcactcgctgccgcaggcggacgatgacgagttgcagagagcactcagcaacatcgtcaagtttccggggagcgtagccaatgcgtgaatcagccgaagcggcagacatccgtcgccgcaagttggagctgttgcagaaccactaccggcacttcgccaccttcatgcgagacatcatgaaggtgctggggttcgatccgacgtggatgcagtacgacatcgccaactacatgcagtacggcccgcacctcgcaatggtgcaggcacagcgaggcgaggcgaagtctaccatcgccgcgatctacgccgtcttctgcttgatccacgatcccacccaccgcgtgctgatcgtatcggcaggcggtacccaggcatccgagatcgctacgctgatccagcgtatcatcctcacggtgcccacgttggagtgcatccgaccggacaagaactccggcgaccgcaccagcgttgacgcattcgacgtgcaccactcgctgaagggcatcgacaagtccccgagcgtggcgtgtatcggcgtcaccggcaacctgccgggtaagcgagcggacctgctgatcgccgacgacgtggagtccaacaagaacagccgcaccgcagccaaccgcgagctgctgctgaccatcacgttggagttctccgctatctgcaccggcaagcccggcactccggggcgcatcctgtacctcggcacgccgcagaccggcgactccatctacaacaccctgcctgggcgcggctacgacgtgcgcatctggcccggccgctacccgaccccggcgcagcgcgagcactacggcccgcatctggcgccggctatcgtgcagcgcctggaggccgaccccatgttggcgttcggcggcgggccgatgggcgacgaggggcagtgcaccgacgagctgttggccggagagcagaagcaccagtccgaactgcggcagcgtggaccgtccagctaccagttgaactacatgctcaacacgcggctcatggatgcgcttcgcttcccgctgaagaccgagaacctcgtggtcatccccggcggtggcgaccgctacccgctgacgatcacgcgcggcctgagcaatgctcaccagcgcgcgttccagtccagcggctacggcttcgtcatgatgatgcctcacgagatgagcaccgagactgcgcccttgcagggcgtgcacatgcagatcgacccggcgggtggtggtgccaacggagacgaaacggcgttcgccgtgaccgccttcctgaactccaccgtgtacgtcctggccgtgggcgctgtgcccggcggctatgacggtgacggcctgctcgaactccgccgcatcgcggtgaagtacaagccgaacgtcatcaacatcgaaaagaacatgggctacggtgcgttcgccaaggtgttcctgcccgtgctgcgagaagaccgcggtaccgagacgggatacaagggcgacatccgcgaggagttcgtgaccggcaacaaggaagcccgcatcatcggcacgctcgaacctgtcatggctcgtggctcgctggtcatgctggaatccgtggttgagatggatcacgagtacacccagcgctacgcatccagcggcaagcgccaggtctacagcctgttccaccagatggcgaagatcacacagcagaagggcagcatcgcacacgatgaccgcctcgacgcactggaaggcagtgtgcgccactgggttgcgcagcttgcactggaccagaacaaggccatcgtcaagcagcagcagcgagagttccaagactggatcaacgatccgaccggcatgaaggcagcgacccgaaagagtccgctccaacgtggccgtccatccctactcgaccgctaccggaggtaatgtggcgaacaagcttatcaacatggcagtacggaccagcacttacggtgctgagctactcactgccgaaaactccgccgccgcacgagtgctcctcggtgttaccggcggaggtggcggcggcgaggtagcctctgtcaacgggcaagttggtgctgtggtactggactacgcggatgttggagcagcctctgctgcccaaggcgcgaaggccgacacagctttgcagccgggtgacgcagttggcgcgatcagtagcgtcaatggcaagaccggcactgtggtgctcaccgccacagacgtgggtgcggccaccgccgcccagggtgccaaggcggacactgccctacagcccggagacatcccagctcagtccgtaaccagcgtcaacggaaagaccggtgcggtcaacctcgtcccggccgacctgggtgccgctactgctacgcagggctcgaaggcagacagcgccgtgcagcctggacagctcgcaacggttgctacatccggcagctacaacagcctgacgaacttgcccaccttgggaactgccgcttcgcaaagcgcggcagctttcgcgagtgctgctcaaggtgctgctgctgacgcggcacttcccgcagcactggttcccaccggacttgtcgttgggttgtccttgaagtacgcgagcgcgactacggttacggtcacagcggggtcggcttacatcccgggaacagggttggtgtctctcgcatccgactccaccatctctcccggactggcagccagtgtgtggcgacatgtctaccttactccttccgggtcggtcgaggcgtctgctacagcaccggctgcgccgtatgctggtaccgctcgtactaagtctggcgacaccacccggagatacctgggtagcatcaagaccgacagctcgggcaacatcgtaaagttcttgcacaacgccgcaaccggtgcggtgaagtacctttacgacatcaacacggcgcccttgtatgtcctgtctgccggggtggcaacgagtaacaccgttgtctcttgcgcagcagccgtccctctaacctcccgcgtaatgtatgcattcgcagaaaacgtggcagcctcgggtgctttcgcctacatagctaacccggatgcggggcctgctggtccgaccatgatcttggagtttctgcgcgccaacttcatcatgttcggagagctggtgctagactcttcccagcaattcaactactcgcgtaacactgctgacaccggcggcctctccgtctggtgcacaggctacacatacgaacgataaggagcaaccatgctgaagtccgacttcaccagcaactacaccggcctgtacggccgcggcaactacctgcaccgcgaactgctcgccctcgtggagcacgcggagaagcaccccgcaaccgccgggcagctgctcgcccagttccagaaggactcgacccaggtgctcaacgccctgatcgcggccggtgcgcgcacgcagtcctcgggcccgaactccggcccgcacaccccggtcgatctggacccggacgacaatccgctggacccataggagcaaccatgaaccagcagcagagcaacaaggggctgttcggcctcgtcggtggcatcttcatcggcatctcggcaacgctgctgtcattcacccagggccacgaaggggtacgctacaaggcgtacctcgacaccggccgggtgccgaccatctgctacggccatacggacggcgtagtgatgggcatgacggcaacggagcaacagtgcgacaagtggctgatcgaggatcttcagatcgcccagaagggagtgcgcaagcacctgaaggttcccgttaaccgcaaccagatcgacgcctacacggacttcgtgttcaacgtgggcgagccagcgttcgcgaacagcaccatgctccgcaaggcgaacgcaggggaccgcgaaggtagctgcaaggagttcctccgctgggtctacgtcggtaagctcaactgccgactgtccagtagccggtgctccggcatccctaagcgacgcgacgcagagttcgccctctgcatgcgccccaacaacgaggtgatccaaccatggaaaccccaagccaagtaatcgcgcggcttagcggtaaggctatcggcctgctgctggtcgtgaccctgttcgtgtgctccggtctgtacgtctacggcctgcaacgcaaggtggagaagctggaaactgcccaagtcggcacgaccgctaccgccaaggcggctcagacccaggccaccgggtacgcaacctacatcaaagagaaggaggacgtgcgtgtacgcactgaagaagctctcgacgccgttcccgagtaccgtgacggcactgttcctgctgatgtcgctgacctcctgcgcgaacctgccggttcccagtgatgatctcctgaaggactgccatatcacctacctcggtggtgagcgtggctcctcttccagccaggacaaggtggtaaagctggcacaagaccgccggatggacaccgttctgtgcaacaaggacaaggctgcgctgcgtgcgtggaaggccgaggtgtgtggcgtcggcaagcgccggtgtgtgcaggacaagtgacatgacgactatcgcatgggacgggacctacgtctacagcgacagccaagtgacctacggtagtgctaagggcaaggcggttaagatattccgccttgtctctcccgatggtccagttgttgctgcgttctgcggtgagcggaacatcatccacgactgcaaactagcaatcgaagcaggccgcagtctagacaagctcgtcggtaaggagtcatccgtgctggttgtcggtaaggacgcagcgttcctgacctctgagggtaagacctggagggtggatgcgcctctcttcatgggcagcggcatggacttcgccgaaggagcctacgaaatctgcaaggatgcccgcaaggcggtcgaggttgcgtgtcgtaaggacttgtacagtagcggaccgatcgctagggtcaaggctccgaagtaagccggaccaaaatttgcttcggaaatgcgcgggggtcactccaataagagctcccgcgcgtgcccccgtacgccctcgcgttacgcgcctgggtgtgcgtgtgggcgtgtgcctgcgtgctcgtgcctgggcacgggtgcctgcgcctgcggcgcgtgtgcgcgcctgtgcgcctcacctgcgggcgcgagacgatgcacgtgggtgtgtgcctgtgtgtgcctgcgcggggcgtgtgcgcgtgcctgggcggccgtgtgtgggtgtgtgcgtgtgtgggcgcgtgggtgtgcctgggcgggtgcgcgtgtgtgggcgcctgcctgccttggctgaatggttaacaattctctcgccgtgaggtgttgacgtggccgcctgggtgtggtccaatggcctcactgggcgccgggaagggccgcaggagggccgcaaggggctggacaggtacacacctaccgggtaccatgcgaaccgctgctgtaggcgtgtgtgggccatctgtatcgtttcgcctcgtttcgacttggtgtgatcgacggttcggccttttggtacacctacagctgagaggtccgatgccaagctgaacgccgacgtatcggtaccctgtcgggatcacagtaagctactgctaggctaaggttgacgcttgctgacgcaagcagtagacacagccatgcaatgtaggtaagctgaccgggagttgagtgaccaagctattgagtaagatggtgggaagccctcgggccgacgacaagagcaaccatcctatagctatctgagtgtgatgcgatgagctaacacgatgacacttgacagtaagcccacagtgagctatgatgcgggccaggtggtagagccaacggtaaggcggctggatcaccagtaaggagcggaccaccggctatgatgaggtgggatggtggcgacaggacgcccagcgggttagagacccggcagtcaagataggcaaccatgccgaggcttgacaagacagcaccacggtgctagtatgtgagtcacctagtgagcttgtcaggtgtgtctgcccgaacatctatcggaaacggcagtgaaagctatccgagcacttgacaaggtcacccaggtgtgcaacactggcaacacgctccgaggagcaccggcactggaccggagtaagactaccgctaacgggtagggtgtaacgtgaagcccttatgggtggaacgccaagctgcaacgtagcactagcggataaccggatgaactagggcttcaaaatcctactgaatccaccagttagctttcttgcgaaagcaagaggactagcaacactggtgccgctttacctagagctaacgtctagggcctgcatctgccgtgagagtcggccacgcaggtaacctactgccaaggtaggaagccggtcataagcgggtggtgagcctgctatcgaggggaatacccttcgtttcgtgaaaggttctgcatcgcccacggtgacaatggcactgctagccggagtagggttgacagcccgaagggctagcagattgatgcgctcta

SEQ ID NO: 9 - DNA, 44585 bp, unidentified
  misc_feature 1..44585: note = the genomic sequence of a bacteriophage
  source 1..44585: mol_type = unassigned DNA
ctgctatgctttgccattgtcacaccgtggtactccaagaaccgtactacgttcgttgagaacatggtgctgcgaattgggccgggcagttccttcgaccggtacatagccgtgatggaacatctggctgacatcaaccactgcgactcgctgagcgcaggcggtgcactagctcggaactcccgagcactcacacggatgtatgcacgctacggctacctgctggaacggcatgctccccaattcaccaagcgaaggagttaacctatgggtagcatcgttggtggtgggtctgcgaagaaggctgcgctgaagcaagcggcggctatcgacaagcagaccaacctccaaactcaatccacgaactaccagattcaggcgatggccgatcagatggcacaggcagctgcacagcaggccgcatccgagtacgccgagaagttgctgagtgcccctgtcgataccgtcgatgtgcggctgggtacttccgacctcgacttgcagaccgccgacttgatcggccgacgcaagaccgcccgctccgcctacacccgacccgtgaccacgaccgcagcttcccggctgacgaccgtggccgggtcagacctgttgtgaggtgagcatggaccattcgatccaaaccgctcaccgccagttcgaggcttacgacaacaagcggcagggcatcatgtaccggctcgaacgatattcgagttggaccgtgcccaagctgttccctcgtaagaaccgcgatcaggacaccgagccgctgacccacgggttccagtctctcggcgcgcaggcagtgaaccatctggcgaacaagctgatgatgtcgctgttcgcaccgtcccgcccgttcttccggttggagctgaagcgcaaggcgaagcaggccgcgcaggaacaaggcgctgacttgcaggccatgcaggcgatgcttgcgaaggccgagcaggacgcgagtctcgaactcgacaagcgctcgatccgatcccgactgtacgacctgctgaaaatgctgatcgtgctgggcaacgccctcatggtgttggagaaggatacgatccgcgtgctcaacatgcggcactacgtggtcaagcgcactcgcaccggcgaggtctacgaactgatccttcgggagaaggtgcacaagacccagctggaacccgcagcgctcgctgccattgtcgcgcacccggacttcaagcccgatgacgacggtatggtgtgggagtacaagtgggtaaagctggaccacaagaccggcaagtacaacgaagacgtgtggatttgcaactgcaagctgcccgccaacttctcctcgacctacaccgcagacaagctgccctaccgggcggtgagctgggacttggccgcaggcgacgactacggctcaggcttggtcgaggactacgaggcagacttccagtcgctctcgatgctgtccgaggccgcagtgcagggcgcgatccttgcatccgagtttcgttggctggtgaaccccgcaggtcagacctccgtcgaggacttcatggcatcgcccaacggcgcggccatccccggcatgaagggtgacatcgagctgattaacgcaggcgtcgatggcgtgctgcaaaccaaccaagcaatccagtccacctacatcaaccgcatcggcgcaggcttcctgttgcagacggcggtgactcgtcaggcggaacgtgtgaccgcgcaggaaatccgcatggtcgccgaagaactggaaggcgggctgggtggtggctactcccgcatcgctgcggacgtgcaggtgcccgtcgccttttgggtgatgaacctcacgggccgcgacatccggggcaaggacttggagcctgtcatcatcaccggcttggccgcgctctcccgaacgggtgaccgtgaccggctgttggagttcggcagcaacctcgccaacgtcctcgcactgccgccgcagattctcgaacgactgaagctgtccgcgtggatcgccgacctcgccgccgctggtggcttggacccgaacatctacgtgctgactgaggccgagtacggccagatgatgcagcagcgtgcacagcagcagctggtcatgcagaacgcatcgcagcagatcgacaacgccaacaacatggagacacagacacaatgagttccaacgcacctccgggcggtggtcccggcgcaaccgtgatcgcaacctcgcaaggcaaccagcccgcaccggcagctccggctcccgccgacgacaagctgctgcccaacggccaacccgccgcaccggcacagcccgcagctcccgctgcacctccggctgctgacgcgctgagtctcgaacccgctgctcccgcacagcccgccgccccggcgaacgctgcgccgaccgctgtgtcgattccggactacggcgacaacggcctgaacatcgcggccgaatacttcgtcaacaccgttggcctcgacatcgacagccgcgaactgaccgaagcagcgaagggcaacttcgccctgctggaagccaagctggaagtcctcggcgacaaggccaagggttccgcaccgatcctcgctctggcgaaggaaagcatcgctcgtgtcaccgctgctgcaaccgcagctcacgccgcgaacgttgctgctgtccacgaagccgtgggtggcgcagagaactgggctgcgatccagcagttcgcacgggccaacctgcccgccgaccaactgaagcaggcaggcgaatcgctgtcggctggtggcttcggcgcacaggcgaccgcgcgttacctgatggctctggcacaggccaatcccgcgacgaccgtcaagggcgcaccggctaccaatgccgccgctccggccgcgtcgatcaacggcgtcgctcctctcacgaaggagcagtaccgcgctgagtaccgcaagctggttgccgagaagggcatccgtggtgcggcccactccgaagaactgcgtgcactcaacgcgcgcgtcatccactaagaaccaaggagcaacataaagcatgagcaccatcttcccgactgtcccggttctgccgaatcaggtcaaccagtccggcaacgaaaacgccctgatcctcgaacagttcaccggcgatgtcgagcacacctatgtgtccagctcggtgctggaaaagttcttcccgcgcaagcaggtcaagggcaccaacaccctgaccaagaaggccatcggccgaaccaagctccagaagctgaagcgcggtgatgcgccggacggcaccccggtggacttcagcaaggcgtcggtgaccgtcgataccatgcttctgtcgcgtcacagcatctggcagctggacgaaatcttcaccgacatcgacacccgcaaggaaatcgccatcgagcagggtcaggaaatcgccgagttcgtggacctgaccatcagcatcgccgccgcgaaggccgcgtccgccacccagtcgatcttcacccgcaacggccgcgcgccggaaggccacttcggtgccacgcaggtggttctggctgctgccggtgacgagaacgatccggccaaggtgtacgccgccatcggcaagctgttctcccgcatggaggaggagaagaaggtcaagccgcagcgtgatggcgtggtcctgatcgtacgtccggcgatcttctacctgttgcagcaggccgagcagatcagcaacggcgagtacctgacctcggacggcaacaagctgaccggcatcccgaccttccacggctggggcgtcccggtgctgtcgagcgagaacctgccgaacaccgtgatcgaaggtcacctgctgtcgaacgacgacaacgacgacttctacgacggtgacttcagcacgctggtcgccgtggccgtgtcgccgaaggccctgatgatcgccgaagcgctgccgttgcagtcctcggtgtggtggagcgacgcctcgaagtgctacttcgtggactcgtggatgtccttcgccgttggtctggatcgcgtcgagaacgcgggccgcatcgacaaggttgcctaatccgctgggcgcggtccctgaatccttcgggtaactcaaaccgcgcctcgccttccaccaacacaggagcaccatcatggtctttgaccgaccgttcgagatttccaaccgtgtcgtcgccgcaactggcgtggccggtctgcccgccaactccgtgggcaccgtcgtcggcgtccactacgacgccatcggctcgggctgggtcgtgcgtgtccgtttcgtcgatgacgaaatcggctcgcaggacgtggagtacgcaccggcctcgctggctctggctgcggactaagcaacatcccggcaggggcgctccggcgtctctgccttgttcctctcaggagacaccatggcattcatcaccaagctcgacatcgtgaacgcctgcatcaagacgatgggcgagacgaagctcaacacgctggaagatgaccacgtatacaaggacgacgcagttgacttgatcgaccgcgtgcaccgcgacgtgtcgtcgctcgcgctgtggttcaacaccgaatgggtggagctgaagccgcaggcaacgagcaagtacatcatggtcccaacggacgtgctgaagctggactgcaacccgagccgattcggccacgtggtgcagcgcggacgccgactgtacgaccgcaagcgcaacacctacgagttcgaccacaacgtgcacgccaagctggtccggctgctggacttcgatgacctcccctacgaggttcagatgttcgtgcgggacgacagcgtgctgcgcttccagtctgacttcgacggcgacaacaccaagtacgccaagatcaagcagcagcgcgacgactcgtggatcaacctgaaggccgagcacatccggcagatcaaggcgaacccgctgttcgctcgcgcatccgtggacgttcttcgtcagcggttcttcaactacagcggacacccgtggcatagccactacactttccccggctaaggagacatcatggcaaaggcaggcggaacctatcccgacatcctacagggtgtcagtcagaaaccggcgcatcgtcgtcggccgggccagacgcacgagcagatcaacgtgctgtccgatccggtgaacggccttgtgcgccgtcgtggtacgcggttcgctgcttcccaagccgttgtcacctcggccgagctgcgcaacatggacgtgttcgacttcatgcaggagggcaaggagtacgcgctgctgtaccggcgcgacgcctcgtcatccagcagtgcgacgttcgcgttcctctacaacaagacggacgaggcgttcatcccgctggtctacgagaacagcacgtgggtcaacacgctggtcagcggcggtgcatcatcgctcgcggccatcggcagctacgtctacatcgcgggcaacaccacgatcccttcggccaccagcaccaacgtgtggcaggagcagacgaacatccagcgcctcgccgcatgggtgcgcaccggcaagtacaacaccacgtacacggtgaacctgacgcgcacggacaacacggtgctgacggtgacgttcaagacggtgaccgcatcgtaccccggcacgctcgacacgagcgacattccgttctacctgcccggcggaacggagccggacccggcgtatcagaagtacgtcaacgaccgagtgaacgagtacaactccgcagtcaacgagtggatcgtgaccagcgcagagcagacgcgcccggagtacatcgcagagaagctgtcggatttgctggtggacgcgggcgtatcctcgacgtacatcaagggtggcatcatcattgacgacgaccagttcaaggacatcacggtcgatgacgagggcgacggcacgaccttctacgccgcagggcaggagattaccgacgcgacctacgctgtcaagttccactggcacggcaagatcatccgcgtgcgcccgagcggtgcaggtgcggacgagacgtactacctgcgcgccgagttggagaacggcgagacttcgggctacggctcggtggactggtacgaagcgcccggcgtggagtgcaccatcgacaacctcgtgtcgcagctctacatctacaacggcgtgggctacatcgcacgcaacggtgcgggcctcacgtctctggctccgggcagcggcgagcatccggcttacggtgcgcgcgtcgcaggtgacggtctgacctcgccgatcccgtggttcatcggcaagccgatcacgatgctgtccgtcttccaagaccggctggtggtgggcgcgcagaactacgtcaatgcgtcccgctcggcggactacctgaacttctggcgcggctctgccgttaccatcgaagacagcgaccccatcgaaatcttcgcgcacggcagcgagggcgacgtgctccgacacgccacgctctacaacggcaacctcgtgatcttcggtgaccggcagcagtacggcatcagcggtgactcggtgttcagtccgaagaacccgcttatcaaggcgttcagtgcgaacaaggattcggtggacgcgaaggcgcagacctcgggcaactacatcttctacgcacagtacggcagcgaaggtacgagcctgcatcagatgcgcgtcggtgcgctcaacggtcagcagacggtgacggacgaaatgtccaacgagctggactcgtggctgtcgggcacgccgttgcagatcaccgcactcaccgcaccgaacctcgtgatgttccgcacacgcgagcacccgcaggacttctacctgtaccggtacgaggacaataagaacaacgggcagcggatcgtggactcgtggtcgaagttccagtaccacccggcgctcggcgaaatcatcggcgtcagcagctacaagaagaacggcctcgtgttcactgcacgcgggtcgctggtggcgtgcgacgtgttcgacccgaagggcgagccggactcgcatgcgtgcctcgacagctgggcgagttttggtacacctacgggcgtacagaccgcgagcgcaagcatcgccgtcaataagactagcccgtacttcctgctgggttgtccctacgctcaggcgtcggacttccttaaccagttcgatgacctcgacgctggtgcgctggaatacggtgtggtgtctgaggcgctggtgatcccgaccaatccgttccctcgggaccagaacggtcaggccgtgctcgatggtcgcatgtctctgaataaggtaacggtggacgtggaggatacggcaggcatgctcgctgcggtaaccacccgcaacagcaacgtgaccaccacggacttcgagggccgcatcctcggcgactccgacaacctgatcgcgcggcaaccggtgtaccgggggcagctgaacatcagcgtcgggcgcgaagtgcgtgagtgcacctacgagattcgcagcaaggattggctcccgctccgggtgaccggcctgagctggacgggtcagactttcaacaatgtacggagggttagctaatgggttcggttaatacgatcctgcaagcgaacaacaccacccgcgttgcccgtgcgaactaccgtgcagccgttgcgcagaccgacaacacgaaccgcagcgaggtcgccaagaccggcttcgctgatttcatgcggtccctgaagaacaacgcccagctggacgccgccgcgaaggagtacaactccaacatggaggcgctgtccgaggagctgcgtgcacgccaaggggctgggcttaactcccagctccaactggcgaacgctcgcggtgcccttcgggcgcaggccggtgctgtcggtgtaggcggttcgtccgcagacctgatggacacgatggtgcgcttgcaggcggaaatggacaaggagacgcaggacaacgcggtgtcgttgctcgcctctcgcggtgcgtcgcagacggcgcaggtgatgtcgcgtgcatggaacgggatggacatgagccgcacgttcggccagttcgactactcgcagcacatcgagccgaaggcgatgaagcgtcgcttgggcaagctgatcggcgtggccgtggctacctacttcggcgggccgatggcaggcgaggccgtggcggacttcgcagtcggtacgtggcaggcggacaacggcaacttccaaggcatgtcgcagtccttcaacaacgcagcacagaacgggatgcaggcgtggcagcagtccaatgatcgcggcggcaagtcgtgggcgtccactaccttcgggtacaacgacggcaccggcaagcagtccgtgaccggggcgaaggtcaccggcaacttcggcaacaactacgacaacttctccaccactacgtccggcctcggctggttcgatagcggcagcggaggcaactcaggaggcgcatggtaatggctgacatcggcacggttaccttcaacacgcagtccgcattgcagggtggcatcaacgccacccccgcactgtcgggcaacaccagcattcaaggcgctggtgtgaatcaggtcggccccgttcgctcggggtcggattggttcgagagcactggtggtatgacgatgccggacagcaacctgcctgagttcttgcaggaactggcagcgccgaacaccgccaagctgaagcagcagcagatgtgggacggcttcgtcgccgcccgcgctggtaagaccatggacgagattgctgcgaccgagccgtggtacaagaaaatcttcggcgacaccaactacgagattggcgcgagcatgtacaacacgctctcgcaggtcaacgaaatggagagcgacctgctgcggcgcatgccggagttgcgtcagcttccacccgaggcgatggcgaaggagttcaacgacctcgccactgcccggatgaccggcaacggtttcgcggatacggtgttgcagaagaccttcatggatcgcgcgggttcgcttatggacctgcacacgaaggagcgcacggcgtggcagcagcaggagctggtgaaggcgcagtacgctgcgaactcgtcggcgtccaccggcttcaacgaactggcgaagcgcacggcgatgctcggcaccaaccgtcccatggacgagaaggctaccgaggcactgacgcaggcgcagctgtcgttgctcgatggcttgtcgccctcgcgctaccagacggacgagtcgtacaagtcggcgatcaccgcgttctaccgtggcgctgcggatcgcggcgagttccacacgctgaagttcctcaacagcaagggcgtgctgaacgccatcgacccggatgggcagctgggaatccagcagtacgtgaagcaggcgcaggatcgttaccgctcggactggctcgacgccaacccggagcaggccgagaagatggcgctcgtctccatgtacgcatccgagggcatcggtgccaagccgtcgcaggcgatgatcgaggaaatgaactcgacctacgccgccgagactggcagcgacgcgccgctctactcgggcacgcagctcgcttcgatcatggcgcagtccgcaggcgcgcacatccgcgcacaggaagccgtcatcaaccagcgcaacgctgcggccaaggctgcactgactgaccagcagaagctggctgctcaggaggaggacatccgtggtggcatcgaagcgttcaagcgcggcacctacgcgcagacgatcaacattcccggcttggacaaggagctgatcgaggccaacacggtgcaggcatggaacgacacgatggcgaagaacccgaaggtcgccatgtcgcagctggtgtggaatgccaacaccggacgcggcgctgtgctgaagggggtggccgaccagttccagaccacggcacgtgcggtactgcgcgaccagccgaacacggcagcggctgcgctgtaccagcagtggaaggaactgaagcagaccaccgccgcacgcatcgacacgaacggtcagcccgtgcagggccgactgaccggcgcgactaccgctgcgctgtacttcggagatagcgtcaacacgttcttcaacaagctgcaagcgttggagaatggcggcgtgaacttcgagcttgcctacgaggtggcccgtggcgaaatcaccaccgacgatcccacgcagttcgacgcgaacagccgtaaggaatccgaggctactcaggctcgtgttactgacgctatcgcaaagctcaaccccaagtacctcggaatgttcggcaacaagctgggcgactctggccgcgatgcgtatgctcgcgccatcgtccggtcggtcaccgacaccggcggtctgctggacacttctgcggaaggcttgcaggctgcggctacccatgccaagctggcctatggtctggaagacgcaggcaagtacgcatgggagaacgggcgcgacgacgagggccgagtgatcggcggcgtgggtgcatggctgggcttcatggacacgaaggaaacgggaccggctatcgagaaggctatcgacgcagcactgcggcgggtcaacatcgagccgagcaccggactgaaggccgacgtgttccgcatgaaggacagcgagaacggcgagccggtgctgtacgtcaacgctgttggcgagaagggatggaaggttgtgccggtgtacgggcgcgacatcaaggccgagtacgagaagcacacgaagcagcagcgtcagttgcaggccccggtaccgcagggctacgttcgcatgaacgacggtacgattcagcagagcatttccatccaacccaaactgtaaggagatagacaatggcactcgatctttcggggctgacccaagaccagcagattgccaaggctgccgcttatgcgggagtgccggagtccatcgtgcgcggtcagtggcgagtagagtccggcaacggtcgcgccgccaaggacgctgacggtgtgatccgcagcaaggcaggtgcacagggcgacttccaagtcatgcccaccacgcaggcaacgtgggaagcgcgcaacggtcgcaagtacgacatgcgcaacttccaagacagcatcgagctgtacgccgacatcatgcgcgagaacatgcagcttgccaagggcgacgttacaaaggcgctgcgcatttaccaaggcggcaccaaccagaagaactggggacaggagaacgcggcctatgcacccagcgtgctgggcggcgcttcggctcccgctgtgtcggcacagccgcgcagcctgagcaccacgcaggcagacctcaacgctgcatggcagggtaacccgaacatgcgcgaccgcacgtggtccggtgcgtccatcccggatgcgtggactggcgctcccatcgaaggccgcaacgctctggcgtcggctgcgaaggaacacatcggcaagattcgtgcgggtatcgccgagctgtcgatggggcaggtcgcgcaggaaggtggcactgccgcgcaggccgtgggccgggcgcaggccgtccgtgcatcggatcaggttgtgccgtggtgggttcgtcaggaagtggacgtgctgaacaccggtgctcgcaaggcgctgctggatcagaccgagcaggcactcgcacaggatcgctcggacgaggagctgcgcaattcgctgaccttcctcgacaagtggggcgcggcgttcgacagcggcatcggtgctgcgatcagcaaccagctcgcacgcgaagacgagaacatcccggagggctggaagtacgacccaaaggaatgggagaagccgtggatgaccgccgacgaactggaagacatccgcgatgcagcgtactcgccgaacgagttgaagtacgtgagcgaccggcagttcatgcgtcgcagctccatgcgcatcaaggaccagcagaccggttggtcgagcttcggttacgacctcgtggcaggcttcaccgatccgggcaactgggctatcggcggcgtcaccgctgctggtgctaaggtgctgggcgtgggttctgctgcgctggtggccgagggccgggtgggtgcatcgcttgcatctgccgctgcggagaacgcagtcggctccgtcatcacggatgccgcactggtcggtatgggtgagcgccgcaacttcgcggacttcatgaccgacgccgcgttcgccaccaccatcggtacctcgatgcacattccgggcgtgcgctcggctgcgcagattcgggacaaggccaccatcgacctgtccgcaggcaacgctgccgcttacggcgaagcgtggtcggctgacctgaaggcgcgcgctgtggccgagctgggcgacaacgccaatccggtgctggtcaacaaccgcatccaccagcttgccaagcaggaggcagtcgattggctgcgggctggtatggctgatgttccggacgacttccgcatcttcgcgcgtcccgacgtgcaggagacgaccaccaccgcaggcaccactggcgcactcgcgcgagacgtggacaacgtggacgcctcgaccggtcggtacaacgacaccgtgggcggcgtgctggatcagcatgacccgctgctggaacgtgcgtggaagactgcgggcatcaagggcggcaacgtcgagggtgtgctgaagtatctggaatccaacgcctcgatccccgaggacgtgcgcgccatcgccaatgcgctgaagcgcggcgggcgactggacacggtgaagatcgtgccggagtccgaactcgacaagtggttcggtggttccagcatgggcggcggcttccgtgtggcaggcggttacaaccccggcctcgacgcgatggcaatgcgcaactacacgcccgaggtggtggtgcacgaaatgctgcacgctgctaccctgcgtgagcttcgcagcaacaccgtgttcggtcaggaaatggaagacctcctgacgcacatcaataacagcatcggcagtgtggactccacgctgaccactgctgccatggaaagccgcatcaaccagccgcaggcagggttcctcgctaacaccgacgagctgatttcctacggcctgaccaaccgcgctgtgcaggcggtgctgcgtcagatgcctgcgccgggcaacacccgcccgaatgcgtgggaatggttgaaggacaagatcgcacgagtgatgggactgaagaatcaggagtccgcgctcgaacgtctgatgtccgtggtcggtgacaacctcggtgccgaagtgcgtgacactcaggcgtcgtcccgtcagactcgcggcatgctcgccaactcgatcttcaagtcgaaccgcgagcgcaaggcgttctaccagcgcacgggtctggacaagtccgttagcgacgacgcgatgcgcgtgcaggttgctgaggtgatggcccgctccgagcgcttcagtgcgaagtacggtatcgacgcggccaagctgtccaccatcatgcagcgcttcgggctggaagctacgagcacgaccctgatgtcgtccaagtctccggtcgcgcgcatgcttgcggtcaccctgttggagaaccccgagggtgcagcaggccgacacagcactgcggcgatggatcggcacggccggttcgagtcgttcatgggtacgcgcccgcgtcagtgggaagcggcctaccggctgtggcgtgctgacgtgcgcggtatcggcgcgatcaaggacttcgccacgggctggaaggcacgtgcggacttcgagtacgcagtgaagctgtaccgcgagacgcgcttcaacggcggtgacatcccggacgcacacgaggcagtgaaggcaatggcccgtgagctggaccgtggctacaaccgcatggcagcagagcagcgcgcggcgggtacggtgggcgcacagcgtctgccggaagaagacgtggagggctacgagtcccgcacgtggctgggtggcagcatcgctgctgctggtccggttcgccgtgagggtatccgtcaggcgatgcgcgatcagttcgaggtgatgggcgagctgtacggggacgacttcctcgacaagttcgctaccaagtatctggaacgcatcgagcgcaaggctgcgggtatcatcgaagcgccgggtcaggtcttctcggagtcgcaggcggacacgctgcgcgacactctgcgggcgatgtcgctcaacgaggaggagattcagaaggtgatgggcaagtacagccgtggcggtgcgaagcacaccaaggcgcgtatcgacctcgacgtgaccaagcagtacgaagatgccgagggcaagttccgtctgatggactacctcgacaaccgcgtgatggacaactaccgcaagtacgcgggccgtgttgctggtgacatcgctctggcgaagcacggcatcctcggtgacgcgggcatcaacgtggcgcgcgaggcaatgcgcctgaccggtgccaacgacgtggagctgaaggcgttcgagcaggtgatgtcggagttcctcggtcgccctgttggtaccggcgatccgactgttctggcgaatgcgcgcctgctgacctcggctatccagctgggtggtgcaggcatcaatcaggcagcggagtacagcaatggccttgccgctgttggtgctgctggtgtggctgacgcaatccgtatcgctccccgcatgcgtggcgaaatcatgcgcatcctgaagggcgaggagagcggcaaccaaatcctcgacggcttcgagttcatcagcggtcgcggcttcggcctcgccggttacgacctgcacatgttcaactcgttggacacgcaggcgtcgatgtacggcagcgagcgcgcaggcttcctgacctcgctggtgcagaaggccgcgcacacgaaccgcatcctctcggggcaacgggccgtgctcgccgtgcagcagcgaggcttcgcggaagtgctgatcgccaagggcgtgaagttcctgcgcgacggtgccgaggctgacaccgccctgaaggacatgggcatcgacgacaacctgctgaaccgcctgcgggcgacgcaggataaggtcgtgcgctggggcgctgacggtaagctggaagcagtggacccgcgcaacgtcgatggactggcggatcggcaggcatggttggcgttctacaacgcgatcaaccgtggcacctcgcagattcttcaggacaccttcatcggcgagacgggcaagtgggcgcacaacggttggctgaagctgctgttccagcaccgcacgttctcgctagtcgcacagcagaagcagctgggccgctacgtgggtaactacggtgcgtggcagactgcgggcctgatcgctgcggcgatggccgtggctgcgccgctgcaagccctgcgcgtgctgtcccgcgtggccctgatgaacgatcaggagcgcgaggaggccatcgaccagaacatcctgtcgcctctggcgctgggcaaggccacgctgaactacgtgtcggcgacgggcatgctcaacgacgtgctggacgtgggcaccggtgtggctggtgggtggtacgagtacgccaccgacacgcagggtccgacgtggctgaagcagctggccggtgggcagttcggcaaccgcaaggaagtgatcggcgggcagttcgcgccgtcgctgggcgtcgtcaacgacttcgctcagggcatcgctggcaagccggagaatctggccgacgtgattccgggcgggcgactgcccatggtgatcccgctgctgaagggcgcggccagccagtggaaggaggagtgagaatcagggccaaggatggcccacccttttggtacacctatagcaaacaggaggcagcatggcagttccagacccgcagctgcgctacgcgacagacgtgttcgacgccgatggcgtgaccactgactggcagatcagctttaccggtggctacatcaatccgtcccacgtgtacgctatgagcggactgctggacgaggagactcagctgctgaccgaccggactccccacaccgtggaagtcctgagcgaagacgatgacgctagtaccgtccgtgtctcgcccgccgtcgccgctgggcgcaagctctacatctaccgcagcactccggtgcagcagatgctcgttgactacgttaacggtagcatcatcagcaagaccaaccttaacctcagcaacgaccagctcctgaagatcattcaggaaatgttcgactcgctcaacatcgccacccttagcatcgaccagcaggtcggcgtgatcgtggacctgaacgagattatccagaacatctacaagcaggtcaccgagttgttagccgctggtggtatcgtgtccgtcgccccgcgcgtctggtccggtgcatggaccggcgatcaggtggacgacaccgacttcgacatggtgggcgcggacgtgtccggcgctggtttctacgacgtgtacgtcaacggcatcggcatgcagccggacgtggactatcaggtcacgctggccgacggcaccgatcccagcttcatccgcttcgccacggttcctgccgagggcagcatctggttcgccgtgctgcgtggttacgccaagccctacaccgggcctgcgccgatcactgctgcgagcctgcgcgtgccgatcatcccggcagaaggcccgacctactacgccgcgaaggctaccgagtacggcctcgtgcgctgcacgtatgccggaggctgcgccgtcaacatcaacctgatccccgaagtgggtgacggtgagacgaagctcgcctcgggcagctacttcagcgtgcagcagaaggcaggcccggtggtcatcactggcgacgtgggcgtgaccctcgaagtcccggtcggctgcaccgccgcaactcgcggcaccaactccgtcgtcactgcaacgtgcatcgacggcgacaccaacacgtggttgctctcgggcgacttggctaaggagtaagcatggctaatcacttcaggctgtacggccgaccgctgatggcggacgaggttgcagatggcctgtcggtgacgggcgtgctggaagggtacacggcgggcgaggcttacgagtctcgcctgtccatcaacaacccagtcggccgctgcaccgtggaggtcatcgaatcgacgctcccttcgggcgctgcggtacgggtggacaacatcaccaaggaagtcgtcgtcaagtgggcggctttcactgaagtcgtggacgaggaaaccctcgtgcctaatggcgacttcgaggcaggcgacgacggcacgtggttgccgggcggtggatcgaacggcgaaggctggtcgattggcaccggctcggactacgacaccgacagcggcgtatacagcgctcgcttcgccaacatcaagacgggcggtagcgatctactcaacccgctgattcccgccaaggtcaacgattacatccggtgcaccgccgaagtccagcagggcgcaagctccaagggcaaggccggtgcgcgcgtgtccatcatctaccgcaaggaggatgggaccgagctgcaacgcaactggggcaacatggtttcctcgggcagcaacggcgcgtggcaccagtcagtcgccgagggcgcagcacccaaggacacgaagtacgtgcaggtggtactgtccgcattccgcagcaagcagaacaagccgctgtgggtggacaccgttaagtggaaccacaagtacgtgctgggtcagaacgacgacagctcctacttcctgagcatcaaggtcacggacgggttgaaccgtgtggcctactggtcaggacgtatcgaggagcagggcatctacgtcacgtcgaagctctacagcttctaccagttcgatgctgcggtgcttaccagcagcttcgctgggtacagcaacatcgacatgctcccgcccatggactccgccagtgttggttcctcgttcgtgggctgggaactccgaagctctcggcaagactactcggctgctcccgagtccatgatgtacggaagctctttcgtttcgttcgacatccgctctatacgaaaggactacacaccggacccggagacggctcgtatttctggctccttccattccttcaccctgaagcagcacccagtagtcaaccagccgcttgacgcgactgtgcgggctaagagcggcttcgtctcatggagtttcgcatgatccacaacaaagttggagtagctggtgtgttcaccatcagcaagggcaagtccttggactcgctcgaagtagttgcagactggcagaacaacctgattaccaacggcggcatggacgcactaggcgatcagggtagcggttacgctcagagcctctacaacatcatcgggtacctcgcagtgggtagcggtagcgccgagcctgcgtttaccgacaccgcgcttggcgctcaggttgcgcgagtcggccggacaagtacggacaacggaggcactaccaccgcgccgtactacgcctacgctcgcgctcagttccagttccccgcaggtaccgctactggcgtgttgtctgagctgggcggcgtctggtataacagcagcacgggtgcctacatccttaccacgcgggcgcttatcaaggactcctcgggcaacccgaccaccatcacggtgctctcggatgaaatcctagtggtgacctatgagctgcgcatgtacgtggacaccacaccggtggtaaccaccgaggttatcaagggtgtcagcaccaccgttacgtgtaagccaatcgcgctgggccgctccggttcactgagcggcgcgtcctcggtggcgtggtccgactacgtgtggggctgctactacttctacggcggtaccggtgacggcactggtgctatcaccgaccagtacccgccgggcagtctgaccagcttctcggacttgcagattcagtacgtgccctacgttcccggtacgtactaccgcgatgtggtctgccgtatgtcgatcaacaacgttcctccgggtcctatcactgccgcgcagggactcaacgctgtggtgccattccaagttggtttcaatccgggtgtcaccaagaccggatcggagacggcgaacctgcgcatgcgcgtttcgtggagccggtatacgccatgatccctactgtctcccaaagcatccaacgaggtgactgggtagagcagcagaaccggcgcacccgcccgctcattgacttcgagcagggcgggctatccctcaacgcagcagtggatgacctccaagctgcgctgtggaccgccgagagtgacggcagcagcgtcgtcgtttaccgcgacggcgttgcccctgtcaccgtgctgacggactcgggcatcacgcagatcgcactggcattcgaccagaccatgcgcccgcacatcgcctatatggcgggaggtgtgtgcaagttctactggtacgacacggtggccggctcaatgcagaccatggtgatccccggtgcaaccacgccccggctgtgcatggacgagaagcgagcgctattcgccacgcagagcgacgtactgctttcctacaagaacgggagcagcctgtgcgtgcgtgcacagcgcgagcgcttcgcaaccgaacacgtgatcgccaccggaatccccggtgacctgatcgcggttggcatgaacaacgtcaaccgcctgcaatggaagctcgtcggcaatcccgacgactggccttaacctacaggagaacagcatgaccccgccgagtgtggtcaatgaggtcgtccgaacctcgccgcttacgctcggcgcggtctacctcaacttcatcagcacgtatggtgctgccatcgtaactacgctcgccattctgtatgccgtcgcccagttctactggcgcgcgcgcgagcaccgcaagatcatgggagggaaggatgtcgaacccagcaagtgagggcgcgcttggcgcactccacgaactcgtcgccacggtactgaaggaacgtctcgccaacggcgagctgtgcaccgcagccgacatcaatgccgcgatcaagttcctgaaggacaacaacatcacggcaacgcgcgaggccaacaaggctctcggcgaactggaagacgaactcggcaagcactcgctgccgcaggccgacgacaccgagctgcaagcagcgctcgacaacatcgtgaactttccggggagcgtagccaaccatgcgtgaatcagccgaagcggcagacatccgtcgccgcaagttggagctgttgcagaaccactaccggcacttcgccaccttcatgcgagacatcatgaaggtgctggggttcgagccgacgtggatgcagtacgacatcgccaactacatgcagtacggcccgcacctcgcaatggtgcaggcacagcgaggcgaggcgaagtccaccatcgccgcgatctacgccgtcttctgcttgatccacgatcccacccaccgtgtgctgatcgtatcggcaggcggcacgcaggcatccgagattgccacgctgattcagcgcatcattctcacggtgccgacgttggagtgtatccgaccggacaagaacgcgggcgaccgcaccagcgtggacgcattcgacgtgcaccactcgctgaagggcatcgacaagtccccgagcgtggcgtgtatcggcgtcaccggcaacctgccgggcaagcgcgcggacctgctgatcgccgatgacgtggagtccaacaagaacagccgcacctcagcgaaccgcgagctgctgctgaccatcacgttggagttctccgctatctgcaccggcaagcccggcactccggggcgcatcctgtacctcggcacgccgcagaccggcgactccatctacaacaccctgcccggacgtggctacgacgttcgcatctggcccggtcgctacccgaccccggcacagcgcgagcactacggcccgcatctggcaccgtccatcgtacagcggctcgaagccgatcctatgttggcgttcggtggtggtccgatgggcgacgaggggcagtgcaccgacgagctgttggccggtgagcagaagcaccagtccgaactgcgtcagcgtggaccgtccagctaccagctgaactacatgctcaacacgcggctgatggacgcgctgcgtttcccgctgaagaccgagaacctcgtggtcattccgggtggcggcgaccgcttccccctgacgatcacgcgcggcctgagcaatgctcaccagcgcgcgttccagtccagcggctacggcttcgtcatgatgatgccgcacgacatgagcaccgagactgcacccgtgcagggcgtgcacatgcagatcgacccggcaggtggtggtgccaacggagacgagacggcgttcgccgtgaccgccttcctgaactctaccgtgtacgtgttggccgtgggtgctgtgcccggtggctacgatggcgatgggctgctcgaactgcgccgcattgcggtgaagtacaagccgaacgtcatcagcatcgaaaagaacatgggctacggcgcgttcgccaaggtgttcctgcccgtgctgcgagaagatcgcggtaccgagaagggatacaagggcgacatccgcgaggagttcgtgaccggcaacaaggaagcccgcatcatcggcacgctcgaacctgtcatggctcgtggctcgctggtcatgctggaatccgtggttgaaatggatcacgagtacacccagcgctacgcatccagcggaaagcgtcaggtctacagcctgttccaccagatggcgaagatcacgcagcagaagggcagcatcgcacacgatgaccggctcgatgcactggaaggtagcgtgcgtcactgggttgcgcagcttgcactggaccagaacaaggccatcgccaagcagcagcagcgagagttccaagactggatcaacgatccgaccggcatgaaggcggcgacccgaaagagtccgctgcaacgtggccgtccatccctactcgaccgttaccggaggtaacacatgcagaagtcagacttcaccagcaactacacgggcctgttcggtcgtggcaactacctgcaccgtgaattgctcgccctcgtggagcatgcggagcagcatcccgcaaccgcagcgcagctgctcgcccagttccagaaggacgcgaccctcgtgctcgacgccctgatcgctgccggtgcgcgcacgcagtcctcgggtccgaactccggcccgcacactccggtcgatctggacccggacgatgacccgctgaccccgtaaggagcaaccatgaaccagcagcagaaccaagataccagcaacaaagggctgttcggcctcgtcggcggcatcttcatcggcatttcggcaacgctgctgtcattcacccaaggccacgaaggggtacgctacgctgcgtacctcgacaccggccgggtgccgaccatctgctacggccacaccaagggcgtagcgatgggcatgacggcaacgaaggctcagtgcgacaagtggctgatcgaagacctacagatcgcccagcagggcgtgcgcaagcacctgaaggttcccgttaaccgcaaccagatcgacgcctacacggacttcgtgttcaacgtgggcgagaaggcgttcgcagacagcaccatgctgcgcaaggcgaacgcaggggatcgtgaaggtagctgcaaggagttcctgcgctgggtctacgtcggtaagctcgactgcagactgtccagtagccggtgctctggcattcccaagcgacgcgacgcagagtttgccctctgcctgcgccccaacaacgaggtgatccaaccgtggaaaccccaagtgaagtgatcgcgcgtctcagcggcaaggctatcggcctgctgctggtcgtgaccatgttcgtgtgcttcgggctgtacgtctacggcctgcaacgcaaggtggagaagctggaaactgcccaagtcggcacgaccgctaccgccaaggctgcgcagacgcaggccaccgggtacgcgacctatatcaaagagaaggaggacgtgcgtgttcgcactgaagaagctctcgacgccgttcccgagtatcgtgacggcactgttcctgctgatgtcgctgacctcctgcgcgaacctgccggttcccagtgatgatctgctgaaggactgccacatcacctacctcggtggtgagcgcggctcggcttccagtcaggacaaggtggtcaagctcgcgcaagaccgccgcatggacaccgttctgtgcaacaaggacaaggccgcgctccgtgcgtggaagcaagaggtgtgcggtaccggcaagcgccggtgtacgggtgaccgatgaccacgatagcgtgggacggcaagcacctgtgggcggatagtcaggccacacagggcgaccacaagcacaccgtccgtaaaatcctccctgtctcgacacccaccggcccagtgctgctgggtgtcaccggggatttcacagtgcttcgcccggttctcgctgcgcttaaagcgggcgaagattacatggagcacgtaggcaagtccgcaacggtgcttgtggttaaggacggcacactcacggtcactactggtaagcagcagtgggttgaggaggctccgtacttcgatggcagcggtaaggcgctagctctaggggcctatcatgcgagcaagtctgtggctaaggccatggctgctgcgatagctcacgacgtgtacagctccgggcctatcgtaaagctaaaggcaccagttcgcaaggctcagtcatagggcctcgtgggtagccggaccaaaatttgcttcacaattacgcgggggtcactccaatagaagctcccgcgcgtgcccccatacgcccctgcgcctgacgcgcgttggtgcgtgggcgggtgtgcctgcgtgtgtgcgcctgtgcgcctcacctgcgggcgcgagtcaatgcacgtgggtgtgtgcctgtgcctgcctgcgcgtggcgtgggcgcacgtgtgtgcgcttgcaggtgcgtgcgcctgtgcggccgtgcgtgggtgcctgcgggtgggcgtgcgcctgctgcctgtatggctggaccgtgctgccttggctgaatggttaataaatctctcgccgaaaggtgttgacgtggccgtcgtggtgtgatccaatggcgtcactgaggagctaccgcgacacctgcccagcaggcgcagcgacagggcttcaggagggccgcaaggggcttgacaggggctaccctacctgctaccatgcgaaccacagctgtaggcgtgtgagggccatctgtatcgtttcggccttttggtacacctatagcacacagtcggctcaacctgaatcaccgtctatcggtactctgtcgagctgataagttagctacccgctaggccctagcctcttgcatacgcaagacaacggttgacacacggccgcaatggtagtaagctgcaacgcaagtcaagtgacgtgatccgtagtggcgccgccaacaagtgggctaagggtacatgggagtcactggtaagggatgcgaggagctaccgaaccacgcttgacactaagctagcagtgagctatgataggcggcaagtgataggccaccggaacagcggagcagctagcctaacagcctacgcaagtaggcacaccttgcggactaccggcatacatggtaggatggtggcgacaggacgcccaacgggttagagactcgaatcgagccaaggggcttgacaggaagcaaacagggtgctagtatggcaccacgctctgaggagcaccggcactggaccgggcaggactaccgctaacgggtagggtgtaacgggaagccttcgggtagaccgccaagctgcaacgtagcactagcggataaccggatgaactgggatgtcaaaggcccacagaatccaccagactagcaacactggtgccgctttacctaggactaacgcctagggcttgcatctgccgtgagagtcggccacgcaagtaacctactgccaaggtaggaagccggtcataagcgggtggtgagcctgctatcagcgggcatacccgttgtttcgtgaaaagtctctttgggacacacggtgacaatggcactgctagccggagtagggttgacagcccgaagggctagcagattgatgcacactcacgttacatctaacttcccacctgacgccgcaagggtattggattgccgagggagacgactagggttgcgggtagtccctgattaggtgtttcgttcgcttctatcacggcacacattcgagtgtgatagctctttgtggagtgtgcatcaatctgttagttttcccaccagtgccaaatggaggcacgacatgcaaggctcgaccaataccaatctcgaacgtacccgcaccaagcgccgcttttgccagttcacccggactgcaagcgtgatggacctgcggaccaccgagcatgaccgcaagcttgccgagcgcaagctccaagccgaacgatacgaagcccgccacggaaccgctggaaagcgatctgtgtttgttgtcgagggcaacagcgggaccaatcgggcgaaccatgccgctgatcggagggcttacctgtgatccgaatcaagttcggccgtggccgcatgtacgacgctttcgagagctggcttcgggcaagggccaagcatcccatcggcgcggtaacgccgttccgtgaagtggtcagctgcgacggctgcaccatcatcgggtacacctacgacatccaactcgcctaatgcaagctactgggccttcgtaagagggcctagtgtcgtgcaatcggcacggacccaacctgaagggaaccaccatggacatcatcaccggaagcgctgacatcaagcgcgccatcaagtcgatcaacacggcccgcaccaagctggtcgatcagattcagcaggccgcgattgcggtcatcaaccacgcacacatccacggcgacgttacgctcgcttccgatctgtgtctcgccgtgggcaacggcatgaagcatgaggccctgcgcctgtacctgtccgagttcggcccgatggctccgaacgacgacaaggaaaccaaggcgagcgcgcccatgaagtttgccaagagcaagcgtgtcgagggcgaagcactggccgacgtgctggaacgtgccgccgcgaaggcgtggtatgacttcaagaccgagaagcccgccgaggcgttctctttcgccgccgacctgcacaagctgctgggccgtctggaaaaggcaaccgagggtggctatgtgccgaccgaggaggagcaggccgtcatcaacgctgcccgcgccgtcccgaagcccgccaagaaggtgcaggcgtaatgctgcccggcacccgcgtcgtcggagccggtgtgcgtgggtgccgctgtctgaccgagggcaaggaatacacggtcgaggactatcagcccgcctacaccgacccgacaagttcgagcggattcacgtggcctgcctacgtgggagtcatcaacgacgatggccgactcgcctactaccacacccaccgattcaaggagaaagcatgaacgtcgataccgacatcgcaatcaccatgccgagtgaggaagccgtgttgcttcgctcggcgctgcacatcgccacccgtctggccgcgctgctgcccgcagggtacggcaatcgcaagttctccgaccagttcggcaaactgcatgacgagctgcgggatgctggcgtggaaattctgcccgacaccgtgcagttcagcgagaacatcctcgactgcatgcgcaatgccgagcatcccgacgaccggctgctgcgcgacctgttcaagcagacgaccttcccgcaccgctatgggctgcgcggtgccgagctgcaagactggctgaccgtaggatagggcggcaggtctgtgatgtcggagctggacttcgccgctatcgaggcccgtgtgctggcctgcctgctcgatccgacccccgccgattgtgctggacgcatcgcagctgcctttcgagttcaagggtacggtgaccgggcgcaccgtgctgcccggctcggccatgccggacaacgtaccgcgcaagctgccggacgtgctgatggacgaccagagcgcacgccacgtggagctgaccgcatcgcagaccgggctggtgaacaaggccgagccgaagggctggatcgtgcagttcaatctgcgccatggcagcatcgccctcgccaactgggctcaggtgcgtgagctgggtctgcctcagcgtagccgcaatgctgcgtatcgtatgctgaaggcgcgtgcaaaggcacagggcatcgccgaggacgcctatcgtgtggtgcctgccggtactcccgatggcccggaaaaggatcgcggcttctacaccgccgagttcttcaccaagcatgcgatccggcagcaccagctgggttggcacacgtcgagtgcgcgtggcctgaacggtacgttcccgactgcgcaggccgcacgtaacgccatcgaccagcacgtgaaggacagcggcgcaaccgcgagccgctaccgtgtgaagtggcacaagaacgtcgcgtgatctaccgctgcgccttctaacgagggtgcagctttggaaccacgcccaacaggagggcaaattgtatgatccctatcgtttacaagcgcatccgtagtgggaagcgcaagccgttgcagttggcagagaggccgcgcaactggaaagagttcgtgacctacgagcacagcgtggagcgctggtatgcgtgaggtcagcctgcgttaccgtgtccacatgacgagcctgaagacaggcgctcagtggtacagcggtcagcacctcggcgcacccattgggtggacgttcgaggatcgagaagaagccgagtcatgggcggcgctggtcaagacaaacgaccgcatcgctgatgtcgaggagtacgaaatcccacccgtcaacaaggagaaccaccatgcgtaagctgtacttcatcacgtccatcccggccaccgcaaaggatggcgtcatcaccggcgtcgtcgccaatggcacgggacgcaacgccaccgccgaggaagtgaccacactggtcgagttcctgcgcgagaagggtgcgtcgcagtccctgctggatgcgctgcgcgacgccacctatccggggccggtgtccgccttcgaccgccgcgccgctgcccgtgccgaggccgcaaccctgaactcgttcggtggcctgttcaactggtccgtcatcgagctgggcgagagcgtgcgtcagccggtgcgcaagccgctgggttggcgcatcaagtacgacggtggcgaagtcagctgctacaacagcagcgaggacggcgctaccgtgcacatcgacggcgactccgagaaccagagctacgagaacctgctgttcccgacccgctcggcggcgcgcagcacggtcgaaaccatcggcgacaagcgcagccgcgagaacccgcacggttactacgtcgagccgtactatgcgtaagctctggctgcgcatactgatcctgctgtactggatcgtgggtcgtcgcccgtgggttgtcgtcggccagtaccatgacgacgacggtaagctgtgccggttccgcaccggcccggcttccaccgggttctcgctgacgttcgatgacctcgacgaagccaacgactactgcgaccagcgcaactggaaagcagacaccgacccgctcggcaccacgtactacgtgtggcacgagacggagttcaaccacttcggacacaggagaaagtgaccatgggattcctcgacaagatcaagaagggcgcgcagtacatcaaggacaaggtggtcaacgccatcattcccaagcgcgacgacgatgacaccacgccgccgcctcaggtggacacgagcaactacctgcacgtcagcgtgccgctgatccccatcgacaacccgatcctgcgcaagatgctggggcaggattacttccccgtgcagaaggggcagggtcagacccgcatcgtcggcaacaaccagctgaagcgcgtggccgatagcctcggtgccaacaacaaggaacgtcgcaagctgcgctcccgcatgaagcgccgcgccgccgagctgcgtgccggtgcatcgttgcagccgaacgtgcaggccgcactggcaggtgcagcatgagcctgcgaatgggaagctgggtcgaggtgaccgtgcccgacagtcggctgctcaacgtgcagccggagatttccgccgccgtcaagctgatcggtggtgcgacgatgaccaatgcccgtggcctgtacgtccgcaaggataccggcgcactggatgacgaggcggtgaccgtgatccgcttcgacatgaacttgcagagcgagctggtggaccagtacatgagcgccatccgcgccatcgtggaccgcctgctggtgctcggcgaggagagcgtgctgcgtcgtcgcttctacaatggcggcggcggttacaacagcgagctgatcttccagtaaatctcgcactgattgcgtgccggaagggaccacgttaaggaccacccatcaacccgtcaatgaaaggagatacaccgcatgtcgaacgaaaacaccaccgagcagaccaccctcagccactacgaagtcaagcgcgccgagctggtggaagacatcgccaaggcgcaggccaaggtcgatgcgctgaacgagaagctcgccaagctggatgccgtcgaggccaacagcgccgccatcgaagcgctgaagtccggcgacgccgtgtcctacctgttcggtcgtgccctgaacaagcgtgtcctgtccggcgtgatcgtcgccaccggcaagaacgacaagggtgtgctgcaactgaaggtgcagaccggcgaaggtctggatgccgagctgaacctgatcgacagcagcgccctgctgatgtcggccgaggaagtgctgaaggcgcaggaagaaatcgacgccgccgttgccgaggcccagcgtctcgccgccgaagctgccgccgcgaaggctgctgccggtgaaggcggtcagtcgtgagccgggccagcaccagcccgtcggtgccgccgaccagcgcgccgagccgcagccagttcaccgcaggccgtgacctgaaggtcggcttcaactaccgggcgatcagctccggcgcaggcgaagtcatcgacggcgacacctacctgctggtcaccaacgtgaccgacaagaagggcaatcgtcagctggtcaacaccagcaccggcgaggtgtccttcgccacgcccggctccatctggagctactgatccgacgaggatagcatgagcgatacccttcccgacaacgactggctaccacacgccgagcgcctgcctgttggtggccgcacacgagtggcccatgagtgcggggagggtacgcccttgctgattactcgtgagcatgacaagtccaccgcattctgtttcaggtgcggtggcacaggattcaagcgtgagcacgagagtatcgaggccaagcttgcaagaatccacgccgagcaaacgagcgagcgcagagtgcgcgcaactgttgagttgccagagccacgggtatacgacacccgcgagtggccgctcgacgctaaggtgtggttcttcaagatgggactctcgcttcagatgatcgacaagctgcggctgtactggtgcccgagcatcgggcgggtggtactaccgatcactgaaggcgacgacgttgtgtactggacagcacgaagcacaagccgtcaacccaaatggttgactcctgatgtgccgaaggatgggcttgtcgcacgctacggcgtgggcaagggggacaccatcgtgctatgcgaagacccgctatctgccttcaaggtgggccagtgcacagaagcgtggtcgttgctcggcaccaagctgcacaacaaggtgttgaagcagctgactgatcgaggccaacgtgtagcgacgtggctcgatgacgacagaggtagaagcaacggtagcaatcccggccaagacagcgcgcgagtaatcgctgcgcgtctacgtacgtttggtctggactacaggaacatcacgtcaccacgtgatccgaagtattacacgaccgactacataaaggagaagctgctgtgaaagaacgcatccgctggtccgcccggttccagcactggtatcacgtgtccagctgggtgatgtccggtcgtgaccgaagggcactcgacttcgtgctcgaactcaacaagctcaacggcaggaggaactgacatgagcgaccgatccaagtacgatcccgaggaggaaaccgatgagtcttgacaccacgctgctgcggttgtgcaccaaccgtggcaagttcgaccggctcgtgcccagtgcaccacgtgatgggctggacgagctgaccgtgctgatgctcgatgcgttgcgtgcgtactacaaggagttcccggacacgaaggacttgccgttcgatgtgttcgatggctgggccatggagttcaagtggaagacgcagcccgacgacaagaagtccctgctgaaagttctgctgaagcagatgcgcgatcctgtcccgcccgaagcagagcagggaatgatcgagaagctgttggagttggagcttgccaccactgcggtcagcaagatcgtgcagtggaatggtggcgctgagttcagcctgcgcgacgagcttgccgggttggccgagacgatcaccgaccgcatggatcgcaaggctcgcctgcctctggtgcaggagacgcccgaagaactgatgcagatggacgagcacgacatcggcatccacttccgactgcccacgttggcgaagaacctgcgcgcgctgcggggtggggacttcggcatctacgccatgcgtcccgacgcaggcaagaccacgttcctgacgagcgagtccagccactggatcacgcagctggacaacgtgtggccggaccagaagcgcaccggcatctggctcaacaacgagggaccgggcaagcgcatcaagcagcggtggtatcagtcgttgctcggcgctaccatccctgagatggtggagtgggcgaaggatggcagcatccgcaagcgcatcgaggatgcgatgggcggggacatccaccgcatgcagttctacgacatccacggattcaactccggcgaggtcgaggccatcatcaagcagaccaatcccggcttcatcatcttcgacatgatcgacaacatcacgttcagcggtggcatgaccaacggcggacagcgtaccgatcagatgttggaggcgatgtatcaggccgcccgcaactggtgcgtgaagtacgacgccgttggcgtggcgacttcgcagatcagcgccgagggtgagggtgtgcagtacccgccgcagtccgcactgaaggacagcaagacgggcaagcaaggtgcatgcgacttcatcatcatgggcggcaagctcaacgacccggcgatggaacgcttccgctacatcggcaccccgaagaacaagctgcaccgcgcaggcggtaagcgtgacgttcgggaagaagttatgatggatgcagagcgtgcccgcttctatcaggaggcagcatgagtaaggacaagattcacaccaacggggcagcgcaggttctgttcggcgaggaggcgtatcaatgcgcctccgttgcgcaagccaactacctcgctgccatgatgcgccgggtgcacgatgccgggtacatcgaaggccgcaacgacgcgccgcagtggaagtggggatggctgcggaacaagcacagcacttggatcggcgtgcactactcgccgcacaacaagcgctggtgcatcaacctgatcccatgcttcacgctgtggatcaccaagcccggaggtaacacaccgtgagtaccgaaccgaacatctacctgccgcgcaacgttggcgtcatcacgtccagccgtaccggcagcagctacaccgtcgagccgcccgtgaccaccacggacatcgactacctcgtgctggtgcaggacttccacgaggccctcaacaagctggaacaagcggggtggacggtatgcaccggacccgatgggcactacgaggaggacgaggactacagcacaacgtggtatgccttgcgcaatggtgtgttcaacatcatggtgaccgccgacagcggatggtatcagcgcgcggtcgaggccaccaccatctgcaagcgccgcaacatcaaggacaagcaggaccgcatcatcgtgttccggtgggtgcgtgatgggctggacttggatggcgatgcgtcggatgaaatgtaccagctggccctgcaacggtggccgctgtgagcttcacttccttcgaccttgaaaccacgatccgtgccatcctgaagcgcaaggccaatccgttctacgacatgaacaagatcgtagcgattggctacaagcgcaagggtgacgcacggaacaccggcctgtactacgacacccgcatcggcatcgacaaccagtacatgggcggcgcacccgatgggtggctgcgagagctgtgttacgggcagcagttcctcgtcgggttcaacatcaagttcgacatcctgcacgccatctgccaaggcccgctcaaccgtcaagcatggatcgagttcatcgacggcggcggcatggtgtgggactgccagcttgccgagtacctgctgcatggtatgacgcaagagttccacatggcgagcatggacgagacggctccccgctacggcggcaacctgaaggacgatgcagtcaagtccctgtgggctgcgggcgtggacacctgcgacatcgacaagacgctgctgatggattacctccttggcaccaacgacaccgacgacgtgggcgacatcggcaacaccgagaagatgttcctcggacagctcgccgccttccgtgcacgtggtggtctgcgctcggcgctgctcaacatgggcgcgctgtgcttcaccatcgaagccgagtacaacggcatgtacgtggacaaggactgggcgcttgcgaaggcgaaggagttggaggtcgagcttgcaacagcgacggccgaactcaacggcttcatccccgcactgcccgagggcctgaccttcaactggaacagccgcttccacaagagcgcgctgatcttcggcggcaaggtgaagtacacggcgaaggttccgatcatatccaccgagggtggcccgacctacgtgcagaaggacgaggtgcactacgtgctggtcgatggcaccacgacggcaacgccaccggccgaggacttcgacaacctgtggcggtacaccacctacggcagcggcaagaacaagggggagtacaagaccaagaaggtgaaggtcgatgacttgaccaagcagaagttccgcaacgaggacatgctgttcgagttccccggctacaccgaaccggatgccgcgtgggaaagcaagagcgatccgggtgtgtactccaccgccgccgatgtgatcgaggcgctgggctatcgcaacctgccgttcaccaacgcactggctcggcgcgccgacatccacaaggacttgtccacgtactacatcacgacggacgagaagaccggcgagcagaagggcatgctcacgctggtgggaccggatggtatcatccaccacaagctcaacatgaccaacacggtgacgggtcgcctgtcatccagcgatcccaacttgcagaacgtgagcaagggtgagctggacgaggagacgttggaggagaagggttcgcagatcaagcgcgccttcgtgtcccgacacaagggtggcaagatcatccagtcggactacacctccctcgaaatctacgtgcaggcaatcctcaccgagtgccgtcagctgatcgaagacctgaaggcgggcctcgacatgcactgcctccgtgccgagcaggcgtggggcgagcagggcaagtacgactacgacttcatcctgaaggcgagcaaggacgacaagcatcccgagcacaagaagtggaagaagaagcgcggcaacgcgaaggtgttctccttccagcgtgcatacggtgcaggcgtggcgaagatcgctgcgaccaccggcatgtcggaggaggaagtcgaggcgctggtgcgtggtgaggccgagcgttacccggagctgggtgcgtacatcgaccgcatggtcgaggccatcaagcgcaaccgcgtgagcaccaaccgcttcgtgccgcacccggacgcaggtcgtcagggcgtgcctgccgggctgacctgtcagctgggccggtcgcactggaccacgccggatggcaagatgtattctttcagcgagtcgccgtctccggtgttcatcgccaacaagcccgcgagcaagggcggctgcgcgcagtcgttctcgcccacggaaatcaagaactacccgatgcagggcaccggtggtgagtgggccaaggctgcaatgtacgtcagcctgcgcgctttctaccgcaagtacgtgaccgaaccgaaggaatggttgggccgtgcgttgctcgtgaatcaggtgcacgatgccgtatacgtggacagccacggcgacatcgcaaccaaggccgctgctctgctgcacgcctcgatgctggaagcgtcggtgtatatggagtggtggttcaactggacgctgccgcttggcgtcccgtgcgaaaccaagatgggcgacaacatgatggaggagaagaaccctcccgcagagttcgccggtctggtcatcgagtaccgagcgtcgatccgcaaggacttcgtaggtaatcacaacccgtcgtttgaataaggagaaccacacgcatgagtcttgacgcactgttgaacaaggtcgccacgcagggcaaggaccagtcggtcgccagtggtggcaacttcgactacaccccgcccgctgccggtgtgaccaccgcccgcatcgtcgggtactacgagctgggcaagcacgagttcgagttcgagggcaagaagaagacgcaggatgaagtcgccatcgtgttcgagctgaccggcaagcagcacccgcacatcgagacggacaacggtccggtaccggtgcgcatgacgctgacgctgggcctgtccaccaacgagaaggcgcactacttcaaaatcttcagccgcctgcgcaccgacgagcgtcacttcgtgcagctgctgggtcagggtgtgctgctggaagtcatccacaagccgggcaagcgcgacccgaacaagaccttcgccgaaatcgacaaggcttccatccgcaagccggtcatgccggtcccggaaatggagaacggcatcccgactggcaagttcgtggacaccgtgatcccggtcccgcagcagatcaccccgctgggtgcgttcgtgtgggacttcgccgacgccgacatgtgggacagcatctacatccccggcgagtacccggaacgcaaggacgagaagaccggcaaggtcacccacgaggcgcagtcgaagaacaagacgcagctgcgcatcgctgcggcgctgaacttcaagggcctgccgtgctacgactacgccgccgccaagttggcgggcagcagcacggtcaccaaggaaggcgtcgatgctctggacgaagcggtcggcgacgtggcgaacgccgcgcccaccgattctgctccggccgacaacaagccgccgttcccggtggatggtagcgacccgatggcgggcatcgcctgatggacctgagcgctctcatggctgcggctggtgagcgctccccgatgccggtgcaagtggtacgtcagcacaacccgcgcgtgatcgctcacgttgacggggactacatggcgtacttcgcggctggtagcgagaactgctcggcgggggatgcacgacgcaacgtgctctcccgctgcgcacagctgaagcacatcagcggagcgggcaagatcgtgatgcacctgacgcacgccgcgtctaccaagggtgatcgcttcctcgctgctaccacgcagccgtatcagggtcagcgccaagcaggccgcaagcccaacaactgggcgttccttcgtgagtggatggagacatacgagggcgacgctttcactcccaaaatctggctgacacgtgaggccgacgacggcatcgcatacgtcaacgagggtgcggcattgcaccacaacatactgcacgtggtgcacagcgccgacaaggacatgcgaatgttctgcggcgtgcacgtagactgggatggctacggcatcaccgaggttccgctcggcgcttacgacattgtgggcgagaacggattgcagtacggtcacaagtggttctggatgcagatgctccacggcgacagcgctgaccacatccccggactgcccgacgtgggcaaggttacggcggagcagctgctgttcggcacggagaacaaccacgaagcggccatgctggtgcgcggcaagtacagcgaggtgctcggtgccgactggcgcaagaccttcgccgaacaggccgtgcttctgtggatgcggacggatcgtgacgctgaactgctggacgtgctgaagctcgacgtgttcgggccgcagctgaagcaagcattctacgacctcgccgaggacgtgaacgagaagcgcgcaatcttggaggcatacaaagcatgaagcgactcactgcaacgcaagtcaagctgttgcgcatcaagctcgcagcggagcaaggtaaccggtgctgtctctgtcagggacagttcggcctgaaggctccgctcgatcctgttatggaccatgaccacaagaccggcgctgtgcgcggggtgctccatcgcggatgcaactcgctgctcggcaaggtcgagaacaacgcaggccggtatggcgtgcgcgatgtgttcgcattctgtgcgggcatccccaactacctgcggtcccacctcaccaacatcacggggtacctgcatcctacctacaagaccgacgacgagaagcgcatcgctcgcaatgcgaaggcgcgtaagcgacggtcactcaacaaggagacaccgtgacccttacccagttcattcgccgagcaccgaagcgcggcccgaagattctctgcctcgacatcgagacgttccccatcgagttctatggctgggggatgttcaacaacaacttcagcgtcaagcagatcaagcgtgactggtcgctgatgtcgttcgcttgcgaatggctggacgacgaggagtcgttctacatggaccagcgcaacgtgcgtgacgtgttcgatgaccgcaagcagggcaaggcgctgtggcacctgctcaacgccgctgacttcgtgctcgctcgcaacggcaagaagttcgatttgcgcaagatcaaggcgcgcctcgccatcctcggcctgccgcccgtgtcacctgtgcaggtgatcgacccgatgctgctgaaccgcaccgagttcgcgttcacctcgcagaagttggagtacaccaccggcgtgatcgtgccggagctgcgcaagtacgaccaccacaacttccccggcttcgacctgtgggtggcctgcatgcagaacctgcccggtgcatgggacgagtgcgaagcgtacaaccgcatcgacgtgaagtccatgaagttggagtacaagaagctgcgcggctggtactcgcagcacccgaacgtcgccgtgtactacaaggccgatggcagcgagcaccgctgcaacaagtgcggctgcaacgaaatgatcccgcaggatgatccggcccggacacaggtcggcacgtacctcctgcttcagtgcaccgtgtgcgatggctacagccgtgggcgcaagctcacgaccagtgccgaagcgcgcaagcacatcaccgtcccggcataaggagaagcgcatgagacttaccgacgttcgccacggcgaccgtgtacgctacaccggctctgctccgggcctcgtcggtaggtccggcgtggttcgctcgatcagcgcagcagatgttggtgtcctgttcgacggccagctgtacgactccacaatcaagccgcagttcctcactcgcctgatgggcgtgggaggtgtcaccaccacaaggagggaggttcccttgcccgaacaactgaactaccggaacgaggacgagcgcacgatgtccgaccgtggcgtcggcctgaaagatgacggcggcaagccgcaggctcggctgctgcacgagggtgtgccgcgtgcactgtcccgtgtcatcgacaccctgaccttcggtgcgaagaagtacaaggcgcactcgtggcagcatgtcgagaaggcgctcgaacgctatcaggatgcgagctaccgccacgacaacaagcgctgcctcggcgagaagctggacccggagacgggcatccaccaccgtgcgcaccacatcatcaacgagctgttcctgttggagctggaactgcgcgaggaggagaaggcccgtggcgcagagtaaggggcgctcgatcaaggaggcgtgggtcaacatcgccatcggctacagcatcaactactgcgcgaacatcgcgttgctgccgctgctgtggcatccagatcacccgctcatgtcggcgcacgccatcggcgttgccttcacgatcatcagcttcgtgcgccagtacatcatccgccgctggttcagcaagggtgactgatgacctgcgcccgctgcggccaagtgcatcggtacgtcccacatgaggccgagtgggcgcgcttcctagaggagcaccgtacccgcaagcagttcgatgtcgagtgggctaactcactctggcatcgtacataccctgacgacgccttctgcatcctcgtgatgaaggggcgcgcaggtttcgttccattcccgtcgaaggagaactgaatgctctacaagaaccagaccgccatgctcatcaagtcctacgagaacgccgttgcgtggggcgagagcgccgaccacgaggaggcgttgcagaacgcggtcaaggcagggttcccgaacctgccggaagaagatcaggcggagctgtacacccgcatcgccgaggcgtgggaaggctaccgtggttcgctcgctccgcgcaagctgtggatcggcaccatcgtcaaccagttcatgtcgtcccgcaccgcacgcttcaacgctgcgcttggcgacggcagcaagaaggaggacagcgccgatgtttgacatcaagcgggataacgtccgggttgctcccggatacaagaagcgcaagcgcgggttcaagatcaaccgcgccttcaccaaaggcaacttccgcgtgcagtggtacgacgggaaggccacctactgggagcagtatgtcccgtggtacaaggtgccggtcaccatgtaccagatttggagggaccacgcatgagctacatcgtccacaaggcagtcgagcaggacaagatcaagaagaagctccggcccaccgaggagcagctgcgcaccgagtacatcgcacagccgaagtacgacgggtgcaacatggtcgccatcaagcgcggccactgggtgcccaccgtgaacaagggcctgcatgccatcaaggtcggcgacgtgcagatgcagccggtggatcgcggtgtggtggacctgttctcccgcaccggtgagcaggtggtcagcgcgcaccacatcgagaacgctctcgcctccgcgccgttcttcccggtcggcgtgtacttcggggaatactggcacccgcaaatcgaccagcccaccgtcagcggcatgttccgcaagaaggacggcacgcagtacaccgagccgatgttcgtggtgttcgacttcgtgacgctggaagaatgggagcagggctacagcgacctcgtgtatcaggagcgagtgagtcgcctgccgagcatgggtcatgccatcgccgagggcaccgcgcctgtcttctacgccgagtcgcagggtttcctgatcgaccaagagctgggcagcatggaggcggcgaagctgctgtgcgagggcggcgcatacgacggcctgatcctgcgcaagccgagcggcaagtgggtgaagggcgacaagggcacgaacggcgaagtcgtcaagatcaagcctaccctgacgctggacctgcgtgtgctgcgcatcggccgcgctgtcggcgagaagaccggacgcgatgtctacaccgtgttcgtggacctcggcgatggcaaggagcaggaggtcgggagcggcgtgccacaccagctttcgcaagttcccgtcgtcggcgacatcgtggaaatcgaagccatgtccttcagcaagtacggcctgctgcgcgagccgcgctacaagggcatccgccatgacaagaaggaggccgaccggtgagcaacgttcagaccgaagtgtggcacaacatggagcgcgacacggtggaggtgcgagtgagcatcccgttccgtgattacgccggttccctgtggccgaacgagacggtgcgcgaggcggtgatcgaatcgctggaccgcttcctcgccgagcggaggggctgatggacattcgattcggaaagcccgagctggatttcgacggtgaccgcttctctccctacggtggaggccacgtcaccgttactgccaccgcgtggtgcggcaccgagcagttcttcaaccgccagtgcatcccgagctacgaggtcggcggtcctgcgtggccgcacatcatcaacgaaatgcacaccgcactggtctgcatgatcctgaagcgctacccgccgacggacttcaccatcaagcaacggaggtagcatgctctcgcaagtggaactcgaactggaaacctacgccttcggtaaggagcgcatggagaagtccatcgctcgcaacgaggagaagggcggcgcggacaacaacccctacgcccaagcagtgtatcgccggttcgtgcttccgcttgcggagcgcatccgtgcggacatcgactccccgcgtatcggccgtgcccaagcgcacgtgccactgctgcgcgccaagtacgatcccgagcgtcagaacaagcgtgggcaggccgtgagcgccgaggaacaagcccgcgagtggtacgaggctgtggccttcgtcgccgttcgcggtgcccttacctcctgcatgcgtgacaagcacggcgaaggcagcgaccgcgacgtgctgaagaacgtgggcatcaacgtgtaccacgagtacctgctgacacagttcgccgacgcagagccgactctgttctaccacctgatgaacgacatggaccgcaagctctctgtcaacgagaaccaccgcatgacggtgatgaagatgcagggtcgcaagaacggcatcgagttcgtggagtgggggcaggcgcagcgcgatcaggtcggcgcatacctgtgcgaccagcttgcacagctgggcatgttggagattggcgtggtaacggagactgcggccagtgccggtgcagcgtaccgtaagttccagaccaagacgcacgtcaagatcgtactgaccgacgaggtgcgcaagctgattacgcaaatcagcgacttcgtgatcgaggccacgccgttctatctgccgtgtgtcgagccgccgatggactgggtggacatcgacaacggtggattccacacgaaggaaatgcgccgactcaatccgtggatggtgaagacctacgctcagactcgggacgagtaccgcgctgccgagctgcgcaacgagatgtccgcgatcaacgcattgcagcgcgtgccgtggcgtatcaacaagcgcctgatggaagccgtgtcggccatcgccaaggtgcacgacatggaggaaatcatttcgcaaggcgagctgccgaagccgcgcaagccggagtggctgacgaaggacatgaccaaggaaaccatgtcccacaatcaggagttggagttcaagcagtggaagcgcgacatggcgaattggcacaccgacgagcgcctgcgccagaacaagggaaaccgcttctacaacgcaatgaaggtggcgcgcaagttcgccgagtacccgagcatctacttcgtgtacttcgcagacttccgtggccgcaagtacgtgcagaccaccggcgtatcgccgcagggttcggacttgcagaaggcgctcttggagttcgccgaaggcaagccgctgctgacgaaggatgcgaaggattggttctgcatcacaggagcaaaccgatggggctacgacaaggcgtcgctgccagaccgagtgaagtgggtgcgcgagcatcacgaccagatcatggccttcgctgcggacccggtgaacaacgacgagtggaagacggccgacaagccgttgcagtttctgagctggtgcatggagtacgagcagtggcaagtattcggggatcgcttcctgagccgcatcgcagtcggcatggatggttcgtgcaatgggcttcagaacttctcggcgatgctgcgcgacgcagcgggcggggtggcgacgaacctgatcccggcaccgctgccgaatgacatctaccagatggtggcagaccgcgtgactgcgatcctgctgggcgaggaggaggatgccgaagggtaccgcacgctgtggctcgaccacggcctcacccgctcgctggtgaagcgcagcgtgatgaccctgccctacggctcccggcagtcctcgtgggcggacttcatcatcgaagactacctgaagtgcgggaagttcccctcgctcgacaaggccctgtatggcccagcagcgcgcttcctgagcaagcgcatgggtgaggccatcgccgacaccgtggtcgccgcagcgggcgcgatggagtggttgcagcgcggctcgggtgcgatcctcaaccaagggtacgaccgcatccggtggatcacgccgtctggcttcccggtggtgcaggtgtactgggaatccgaggagcaccgcatcaacaccaagctgtgcggcaacgccaagctgtccctgcgcaagagcaccgacgcggtgaagaagtcccggcaccgcaacggcatcgccccgaacttcgtgcacagcctcgacgccagccacctgacgttggtggtcaacgcggccaaggccgagggcatcgacgccttcgccatgatccacgacgacttcggcacccacgccgccgacagcgcggccctgtaccgcatcatccgggaggtgttcgtggggatgtacgagcggcacgacgtgctctcggccttccactcggcctatccgttcctgccggagccgccgccgatgggcgagctggacctgcgccaagtcattgattctccgtacttcttcagctgacggagtttcagtacacctatagcacacaggccaaccgaggtccggttggagcggccgcgattgtaagcggaaccggtgccggaccttttggtacacctatagcacagaggagacaccatggccgaagacgccaaagtgaaagtcctgatgacgctccacccgaaccagcttgccgccgtgcggcgactgtccgggctgtcgctgtccgtcaactcgaataccacgcccttggaggcaggtatgcagttggggatggcccgcgtcctgaacatcttacaggagggtttcaccgttgatacctccgtaccgaacaccaacgacgggtgatagtgagcagatcaaggcggctttaacggccgctttgcatctgtcatctagagaagatagtaaggtagacaacagagaatcttctgtaagctacaactgtgatgatcctgattatacagtagctctgataactcagaacttagtagatgcagtaatcatagacgaagcctac

SEQ ID NO: 10 - DNA, 63743 bp, unidentified
  misc_feature 1..63743: note = the genomic sequence of a bacteriophage
  source 1..63743: mol_type = unassigned DNA
cgatgaactcctgccggccctcgccgttggtggcgtggtggcaggccatcatcaggtcgcgccaccggtcgtgctcggagaagtcctccgcgtccagctgctccagggtggaggccagcatctcgggggtgagctcgccgaggcccgcggcctcgccgtgcgccctggtgggccggcggcagaggcgcatcaggttggcgggcatctccggcatctcgtcgagcgacggggccaggtcgtcccactcgtagtgctgcccgcacgggtgcaccgagccggcggccacgacctggcggccgcgggacttgaactccacgccctggtagtcctccagggagtcgagcaggtcgacgtccgccggcttggtgaaccagtagtggtggccaccgctgccggtgatcgtgtggggcgccgtggagaggtccaggtgcgtgtcggcgacgagctcggccagggagtcgcggccctcggggaagttgcgcgggtcgacgtccaggaccatgacggtcgagggcaggcgtacgcccacgttgacgccggtccgctcggcggtctcgatgaccgcgcgggagtcgtactccttggcctgccaggcgccgtcccgcggggtcttgcctcgctggcggcccttggcgtcctgggcgtcgtacctgtgcagcgggatgagctgcaggccgttctctacgtacgcgcgcatgtcccccgtgcgcggtcgctttagtgcgctcactgtgccaccttcctggcggcggcttcctcgatgatcttgcggaccgcgtccgcctcgctcaccttgtccgggtcgggcgcctggcggcgcatctcctccagcttgctcctcaccacctccctgtggtcctccgacacgcggagggacatctgctgattcaaactcattcccctgtactccgtgggtgcatcttggtcgggccggcggcaggccgggatgagcatagtgcgacgacgcagtgcattgcggaaaccgacgaacgcaatgcgtcaggtccgagggcgccgtcgcccgcggacggtggctccgcgcccggacaccggacggtacattgtcactccctaccaaccgctcaacaaggagcacatgcaatggacgtgaacagtttcatggagcagagcctcgccaaccaggcgaagcagaacgccctgctcgagggcatcctcgacgtgctgaaggacatgaatgacaacggggtggtgatcgcgaacgtggaaggcgagcccgtgcaggtcgccatattcggtgcggccatcaacaacaccgcagtgctgaccgacccgggcaccacctcccagccggccgccgagaagcaggccaagcaggagaccaagaaggctgctgaggccccgccggccgagaccaaggctgccgagccggccgccgagcccgaggctgctccgccgaaggacgacaagaagaaggtcaccatcgacgacgcccgcgccgccctgaagaagtacgcggccatcgagggcaacgacgcggccatggacctgctgaccagcctgaacgccaagtccgtcagcgacctggccgagcaggggccggacgccctgcagaagctgatcgacaaggccgacgggaagagcgtctgatgagcgagcagcccaaccagaagctcccgaaggacgccgcgcagctggtcctgtggttcaagggcctgccgcagccgaccgccttcctggtcctccgcgaggaggccgaccgggccgtgcagtccttcaaggacggcgaggacgtgaccttcctctcctaccccgacggccgcggcgtgcgctccgagtcgatcttctcgatcgacgacctgcgcggcgtgaccttcgagtaccccaccatccagctcgcactggtgaactgacatgccaagcgtccacgcggtaagaaacgcgtcgggggcgaagcggtggatgaactgcctgggctccatacgaatggagcacgggcgccccaacaactcctccccggccgcacggctggggaccgccgcgcacgcgctcggcgaggcctgcctgctcgacggcagccaggcctgggagtggctgggtggctacgtccgcctcgacccgaccgagcaagccacggtacaccggcccgccaactccgtactggatgtggcggcgtccgacgtctccgtcccggtgcacgcctcggccgacgggctgccgcccgcgggccacgaggacttcccgatcgacgccgacatggcggacgcggtgcaggtctacctggacaccgtgcgcgacgagatggagcgcatggggccgcacgccgagatggaggtcgagcgccagttcagcctcaactggctgatcggcttcgacttcgacttcgaggcctgggagaaggacccgtcctacgtcagcccgagcggcatccactacgcagccactgacgagttccccctggggcacctgttccacatggacggcagggtgtgctggggcccgatgttcgggaccaacgacgtctcgctgtacctgcccttcgaccacgtctccgtcatcgactacaagcacggccagggcgtcgtcgtcgaggtggaggacaacgaccaggagctgtactacgcgctgggcaaggcgcacgagctccggtgggccttcgagaccctggacctggtcatcgtccagcccagggcgcgccaccaggacggcaaggtccgacgctggtccaccgacaaggccaccctgcgggcgttcgaggccaggctgcgcgaggcggcccgagccaccgaggagcccgacgccccgctcagggcgggcgagtggtgcaccttctgcaaggcggcggccgtgtgcccggcgctgcgcgaggaggccttctcccaggccgccctggagttcggggacggcttcaccgaggacacagtcgtgcaaagcgggcccgaggacagcgacgaggacctgatgctccggatgcgggctatcccgctgctggacatattcatcaagtcggcgaagaccgaggtgctccggcgcctgcgcgagaccccgggcggtcaggcctgcttcggcaagctggtacgcaagaagtcgaaccgcgccttccgccaggacctggtggacgaggtgacgggcgagccggtgtcggccttcgacgtcctggcggccgagggcatcccccgcgagatgatgttcgaggagccgaagcccaagtccccgagcaagatcgaggcggtccgcccgccggagctgatggccaagctgaaggccgacggcgtgcgcgccccggcggcgcacatcaaggcgctcgtcgcgggcgtgtcgttcaagccggagggcggcatcaccgtggccgcgctcgacgatccccgggaggcggtcgacgcgacggccgcggccgagggggacttcgacgcgtacgacggcgaggagagcgcggactaacggctctagttggatcggggtggaagcatgatgtgcttccaccctttctttttaccaggagaacaccatgcacgaacacaagcccatgcaggaactcaccaaggccgacctgagggagatcgagcgctcccgcgagctgatccaggactgcgccgccgacaggggcccgtccctagaggagcgcctggagcgcgcccgcgccggcaaccccaccaaggaggacctgaaggccttccaccgcgaggcgctccacgccgccatgctcgacttcatccaggaggagtccggcatggtcaggggcctcgccgcccagggcaagaaggacctggcccgcgaggtggtccgcctgcgcgccctggtgaagaccatcaagcaggcgacggagaacgtcgacccgtcgcagccgaacttccagcacgccgaggcgttccgtctgatgacctacatccagaccaacgccgagaagccggacgcgcccgaggtgctgaaggtgtggaacagccgcgacggcgtgaccccgttcatcgtccacatcggcggcaagacgttcgagcaccacctgcagggcatgaccggtccgctgtacgacctcccggcgtcggccacgcacaagtgggtgacgcgcaccgaggcggagaccatggctgcctggcggcgcaccctcgaccgcgccgtggcctccgggcggctcgagccggacaaggccgagctgcagcgcgacaacctgtcggcggcgcagtcctggcactacggcatcggcctggtcagcgtcgtgtcggggcgcttcaccgacgaggagctcgaccggccgctcggtggtgtcgacgagacgcagaccccggaataatgagcgcctgccccggtgtcgccgtccaccgcctccctctcgggttgcgtctcggcggcaaacagacccggcaccggggcagactccacctacatcgctaaacagtcaaatcgctactaaggagcgcatcaaatggcagcagccaagcagaacgaccgcaaggtcacctccccgaagttccgtgccagcttcgcctggatcttcaagccgcagcccccgatggagggcagcaccggcgaggccaagtacggcgtcaccatgctgttcgacgcggcggcccgcaagacggcccagttcgaggccatgaagaagctggcctacgccgcggcgaaggagaagttcggcgacaagctcaagccggacggcaacggctggtaccacggcctgcgcaaccccttccgcgacggcgccgagaagtcggagctggagggctacgagggcatggtgttcgtcgccgctaccaccaagatgcagccgggctgcgtcgaccagcagctgaatcgcctcatcaccgacgaggtgtccgaggacggcttctacagcggctgctacgcccgcgccaccctgacggcctacggctacgacaaggccggcaacaagggcgtcgccttcggcctgcagaacgtgcagaagctgggcgacggcgcggcgttcagcggccgcaccgccgccgagaacgacttcgactccgtcgacgacttcgtcggcgagggcgagcagtcctcgggcggcggcagcttcctggactgacgggtccagtctgaccgccccggtcagtaccgccgacgaggcaggtaagccccaggaggggaccttcgggtccccttctttttgcccgtttgatggcgtcccagggcggaaagccccggcatgatagccccacactgtttcggagcacagaccgtgagcaaagactggcaggccgacctggccctggtggaccagcgcaacgaagaccagcgctggcgtgaagaagccgcccgcgtcctggcgcccgtgccaggccagcgcgaggccctggagcgggcccgcgccaggctggcggcagagcgcaagtcgctgctccagcggggcgctgaattgctggggttcaagtgagccccacgaagcgcatgatggacctcattgaggaggctaactaccagttcctcaaggacgaccgcggctgggcgctgtacgacggcgacgaccgctccgaggtcaggggatcgcggtccccgcagctcggcaactcaatctgggcgtcagccaaagagctgggcctcaccaaagaggaggagtgaagatggacgcagaacgtaggaagcggctcaccgagaagctgaagaagtgcatggccctctcgaagagcccggagccgcacgaggcggccgcggcgctccggcaggcgcagaagatcatgtccgagctgggcatcaccgaggacgagctggacggcctggacacggccgacgtggtcgtcaagactcgcgagggctttggcaagtgccgcaccatgagcaacctggccaccatgatggagcgcgccttcggcgtcaaggccgtcttcgagcggaaccccggctccgccgcccgcctgaacgtccgctacatcggccccaagggccgcgtcatgctggccgagtacgcccacaaggtggtgtggcgggcgatgcaggcctcgtgggacgacctgctgacccgccggcccgacatgaagggcgacggcggcaagcgccaggccttccacatcggctggctcaactccgtgtacaagcagatctccgccatcgccccgacggaggccgaggaccgcgccatccagcggcactgcgacaggatctacgagcacggcgtcgtccagcaggacgcgttcaagaagaaggagctcgacggcggggcattccacgcaggcgcccgcgcggccgccgacttcaccctgcaccggccgatggaagagcagcaggccgcactggagcacatcgcatgagctggctgaagaccgtactgtggtacatcctgaccggcggcttcggctcgaagctgctgaccatccccgagagccagcccttccgcgtcgtgaaggccggcggcaggctcctggtcgagcccatccccacccagatggaccccgacgagccggagtacttcggggtcggccagcggatcatcgtggcgccgcacgccggcttccacaagggcgcccgcggggcggtggagttccacgcacccgacggtcgggtgtgggtcaagcgcgacggggcctccagctgcgtcttctactacccgcacgagctcatcaaggaccccgcatacgaggtgcgcccttgaagtgcgacgaccaccagcactccctgccgtgccccctgtgcgcgctcgccgcctggcccctcagggacctggcggccgtggcggacttcgccggcaaggccgtcgacgacacgggcatcgtgccgggggagaggaccgtcaggctgtcccaggtggtccggtcgatcggtcggcggtggaccgagctgtcgcgcgttcagctgacggccctgaagccgctgtacgccaccaagaacgccctggtgcgggaggcccgcataggcgcgatcgacgtcggccggcttgagaaggctgccctggcggtcgccaagggcgccacggccgacccggacccagtggtcgacgcctacgtgcgcgccatcgtgcaggaggaggtggactggtgaagttctcggcataccaccgcaggaagcggttcaagcactggcgcgacccgcccgaggcatgcgacagctgcggcgagcgcctggtcgtcctgacgggcaacgaggtagtctacaagcagcctgtcgggcagtggccctggatctacctgtgtatgtcctgcggggcctactgcggggtgcacccgcactcggtctaccccatcggcaccttggcggacagagagaccagggcgctgaggtccgccctgcacgccatgatagacccgctctggaaggacgggcacatgtcccgcttcaagacctacaagatgctgtccaggatgatgggcatgccggagggtgaggagttccacataggcaacctgaccagggatgagtgcatccgcgccggcgaggtattcaaacactgggagatgatggcggacttcaatgagccgccctgatacagtaagcggctagcccggaggatccatggtaatcgccccgaacaaagagccagcgcaggtctctgacctgccggagcgctcccaggtagccgcggccgtcaagacggccctgttcaagatcgcctccgcctcggtgtacgagacggcgggcatccactacgagacgaacgcccccaaggcgacgatcgactttgaaacccgctccgcctgctccatcaaggactgcggctcctggcggtactccctcgaccccacgacccaggtcatgtgcctggcgtttcgcctgccgcactgggagaagggccgcacggccctgtggcacccggccttcccgcacctgggcgtcgaggaggccgactgccccgagctcgccgagctgttcgagtggatcagggagggccgcctggtggaggcccacaacgcctggttcgagcggggcatctggaccaacgtctgcgtcccgcgcatgggctggcccgcggtcggccacgagcagtggaggtgctcggccgccaaggcggcggcgtactccctgccgcgcaagctggagctgctggcgccagccctggccctgaaggtggagaaggacaccgagggcgccaagatcatgaagaagatggcgaagccgcgcaagccgctcaagcgggacgtggtcgcctggatcgacgacgagggcaccctgccgctgcccgccaagaagtacaagatcgacctgttcgcgaacgacgacgggacctacacggccgtcgcccactccccgatcccggacgtcgaggaggaggtcttccgcctgccactgttctgggtcgagagcgccgagctgctggagcgcctgtgcgcctactgccgcgtggacgtcctcgccgaggaggccgtgtcggaccgcctgcgcgacctgtccccgcgcgagacgcagatgtacctcatggaccaggcgatcaaccagcgcgggttccagctcgaccgggagggcatcgaggcggcgctggagatcgtcgacggcatctacaccgagctgaacgccgagctggtcgagatcaccgacggccgggtccagaaggcgacgcagcgcgcccgcatgatcgagtggttcaacgacaacgggctgccgatcgagaacacccagggcggcacgatcgactcgtggctcaagcgggaggacctggagccgagggtcaggcgcgccctggagctcgtcagggccctcgggcggtcgagcaccgccaagttcattgcggcgcagaactgggccgacccggagacctggaaggtccacggaggcctgctctaccacggcgcgggcacgggccggtggtccggcgcgggcctgcagccgcacaacttcccccgcggcaacatcaagaacatggcgctcgcctgggaggtcatcaagtcgcgcgacctggcgatgatggagatgctctacggggacgccatggagctgctgtcccacgccctgcgcgggatgatcgtgccgtccgagggcaagaggctgatggtggccgactacgccgccatcgaggcgcgcgtcgtgctctggctggcgggcgacgacgaggccctggacgtgttccggcggaacgagtgcatctacatggcgatggcgaccgagatctacggccgcctgatccacgacaaggaggcgcaggccgaagagcgccagatgggcaagcaggcggtcctgggcctgggctaccagatgggggccaacaagttccggaacaccctggcagagaagtacggcatcttcatcgagctggagttcgcccagaagatcgtcgacgcctaccgcgccaagttctggcgggtcaagaagatgtggtgggaccaggaggccgcggcgatcgccgccgtccggaccccgggccgcgtcgtgaagtgcggcaaggtgcagtggtgctgcttcgacggcttcctgcactgcaagctgccgtccggcaggctgcttggctactgtgacccgcgggtcgtcatgaagccgacgccctggggcgagaagaagcccgccctcacctacatgggcgtggacccgtacaccaagaagtggcgtcgccaggacacctacggcggcatgcttgtcgagaacatcacccaggcgaccgcgcgggacctgatggcggacgccatgctcaggtgccacgaggagggcctgtacagcgtcatcctgtcggtgcacgacgaactgatcgcggagtgcgacatggaccagggcgacgtcaaggacttcgaggccacgatggcctacaccatgccgtgggccgacgggtgcccggtgaaagcagagggctggaccggaatgaggtaccgcaagtgatccaagtaagcaccgcgggggcgccccgattcaggctgccgaactacaagcaccagcaggacgagtgggaccgccacagggacgacgacgcccgggccctgctgtggcagatgcgcacgggcaagaccaagtcggtgctcgacctggcctgctaccggtacgagaagggggacatcaccggcatcctggtgctcgccccgaacggcgtgcacgtcaactgggtgcgccgccagctgccgatccacatgtgggagggcgtcgagtacgtcgcccacgcctggcaggccagcgaggcgagcaagcccggccacgcggcgtccctggaccgcgtcctgcgggcccagtccggcctgtcggtgctcgccgtcaactccgagtccatcatccacgacaagccggccgcgctcatcaagaagttcctgcagaagcacaagggccggtgcatgctggtggtcgacgagtcccacgacttccggtccccgggctcgaagcgcaccaagcgggcacgggcgctcaagcgctactgcagggtgcggcgcaccctgacgggcacctcggtgtccaacagcccgctggccgcgtacagccagttcgagctgctcgaggaccacgccctgggcttcgccaccttcggggagttcgagagccagtacgcctactacgtgcaggagaagaccaagggcggcaggtcctacgaccgcctggaccactacaggaacctcgacgacctgcaggccaggatgtccaggtgggcctccgtcgtgctccgggaggacgtcgacgacatgccagacctgctcatggacccgaggacggtgctcctgtccgaggacatgcaggcccagtacaagaagctcctgaaggagatgatcctggagctcgaggacggcggcgaggtggaggcggtcgagggcggtgcgcggatcatcaagctccagcagctcatcagcggctgggtcatcgactccgagggcaacgtgcgcgacctggtctccgacgaggagaacccgaggctgcagggcatgctggaggacgtgcgcgagtcggaccggaagtgcatcgtgtggtgcaagttccgggaggacatccgccgggtggtgcgcaccctggagaaggccggcatcgcctgcgtcgagtaccacgggaacgtgcactcccaggcgaagcgccaggaggccatcgacctgttcaacaacgaccctcgggtgaaggtcttcgtcggccagcccaaggccggcggcgcgggcctggacctctcggcggcggacgtcatcctctggtactcgcacacgttcgacctcatcgagcgggaccaggccaacgagcgggccacccagatcggcggcaagaccgtcaccatcagggactacgtcacgccggcctcggtggacgagtacatcctcgccaacctggagtcgaagcgctccatctccgaggagctagccggaagaggcctgcgcgaccgactgctggctctgttcagacagcagctgtgatactcccggccggacgtgcgaacgacggctccacgacaattagcccggcgttaaactacacccactgacgcacgccgggcaagccgcccgaacgggcggcgacagtccaatcccaacacctatctctgaaggagagatgcagatgagcgaagacaccagcacccagacctccggcgaagcgaccgagaccaaggaccaggctccgaaggccccgggcgtcggcgagatcgccaagggcctgatccgcgacggcaagaccaacgaagaagtgctggctgccatccgcgagcagttcccggaagccaagacctccatggccagcatcaactggtaccgcaacaagctgcgctcggacggcgagaaggtgccgaccgcccgcgagctgaagggcgacgccaaggccgaggccaaggccaagaaggacgccgagaagcaggccaagaaggaagccgccgagaaggccaaggccgagaagaaggccgccaaggacgccgagaagcaggccaagaaggaagccgccgacaaggccaaggccgaagccaaggcccagaaggaagcggacgcccagcgcggcgagtccgccggcgacaagggcatcttcgagtaatcaccgaagcggccgggcagttcgcctggaaatgatggtttaaggggcacggcccctgccataagatagagggacctggtgcagaccaggtccctttctctatatggacgtccaccatgctgccagccaacatcgtcttcgccaaggtctacttcgtgcggggcggcgcgcccaacttctggaagcgccggtacgagatcaccgacccgccgaccagcggcttcgcccacgtcgtggtgattaagggcgagaagcggtccaccatcctctgcccccactccctggaggccttccaggtcagcaaccagtgcggcgagctccagacggcggagcgcttcgacgtcgagccgtccaagatcgcgcaccacatcgagaaggcctgggagacctgcgtcaagctgggattccagaaggactacggcgtggccgccatggtgctcaccgagatggggttcccggtgcccaagttcctgcccccgccgcccgacccgtccaagtccgacgactccaagcgcggcggcaagccgatcgtcgaggactccctccgcccgtgccgccccgagagcaagcgcggccaggtcgccgccttcttcctgcacgacgagccccagtcgcttcatgaggcgatggcccgcctcgggctgtcccgctccggggtgctctcccacctgttcaccctcaaccgcgaccacggcgtaggctacgagctggtaaacgactgcgcccgcctgctggtgcccgagggcttcgacctgttcgcctacgtcgagccggtcaaggagcccaagccggagaagccgcagcgcctcaacgaggacggcacggtctacgagcccaagaagcggacgagcggcaagccgatcaaccaggacgcgctccggccgatccccgagcccggcaagcgcgccacggtggcccggctcttcgtctcgggcttcttccctatcgcggacgccatggcgcagctggacctggaccgctccgccgtgctgtcccacctgttcaccatcaacaaggagaacgggctgggctacgagctgagcgaggacagccagcaggcccgcctcctggtgcccgagggccaccagtgcttcgcccccaagcagccgcgcgccaagaagacggcggaggcctgagcatgggcatccgcgtccagctccgcccgcacaaggagggggtggcggccctcgagcgcgacgggttccaggtggagcccgtacggttcagccggggtgaccacctcatcgtccgcgtcacccgcggcggcgcgtcctgccaggtgacgctggccggcagcccctcgggccagttcctggacgccctggtctgcgccgcccggcggggcatcagggaggctgcggcccgatgaacgaggtgcgctggagggtgcgccgccacggccgcctcctgagggtcgaggcctgggagggcgacgagcccgaagcgggcgagctgttccaggagcggctgagggagacgccgttctggatgctggtcgcctgcagcctggtcaacctgacgacctggcggcaggcccggcccgcgctcgaccgcctgatggcggactacccgagcccggaggcgctgtcccgggcagagcccgacgacctgcacgacgcgcttcggcccctggggctgtggcgccgccgggccgtcactctcaccaggctcgcagctcggtggctcgaggtggacccccgaagcgtcaagattgagtccctgcctggctgcggcaagtacgccgccgacagctgggcgattttcgtagacggcaggaccgacgtcgacccgacggacggcaagctcacgtggtaccttcaacaactgaggaagcagcaagatggatgagatcgacacgaccggcccgcaccaggccctggtagcagcactggtgagccgcatgctcctgaaagcggagcagttcaacgtccagatcctggacacgcccatcccgggcaccccggagatcctgtccagcatccgcatggacgcctcggtcgacgccctgaacgaggagatccaggagttcaaggacgcccacgctgacggcgacgtgctcgaggccgccgacgccctggtggacctgatctacttcgccctgggccgcctcgtcgagatgggcgtgccaccgctggccgtgttcgacgcggtgcaggccgccaacatggcgaaggtgcgcggcgacctgtccaagcgccccggctggaacggccgcgacgccgtcaagcccgagggctggcagccgcccaaccacgactggctgctcaccttcgacctgtccgacgtggcggagctccaggagctgcgccagcaggcccagggccgcgaggccatcagcccggtgtggctggagctgcagcacctgcgggagaccaagggccaggactacaacaacgtcccgggcgggcgcgaggcctacttcccgttcggccacgagtcctacgcacacatgctccacaccaagaacctgcgcatccagtcgctcatcacggctatgcgccagggccgcgagcccaactacgagggcctgtacgacaccgcccgcgacctggtgaactacggcacctactacgccgagtggctgaagcagcagggcctcgggggcgcgaagtgagcggcgtcctcatgccgttctacgacgtctacggtgcactgatcgcctgggccttcagcagcccgatcgaggcgaacgagcgcaccggaacgcgcgtccacgtcggccggggaggcacggcgttccgcgtcgacctgagcgacggcctcctgccgaccgtcggctaccgcaagaccttcccgcggtccgccgcggcggaggtcgcctggtacgtgcggggcgagcaggacgccgccttcatcaccaggtacgcgccgttgtgggacaagtttgtcgagccgatctacccgcagactcctgccggcactgaggctaagtcgggtgtcgcattcccgggggttcgctctgcttacggctaccgctggcgtcgccacttcggccgggaccagctgcggctcgcggtcgaggcgctgcgcaaggacccgacggaccgcaggtgctacgtgtccgcctgggacccggctgaggacggcctgggcgcccaggggcagaagaacgtgccctgcccggctagcttcaccttcagcgtgacgggcggggagctgcactccagcctgttcctccgcagctcggacctgttcgtcggcctgccgtacgacgtcatgggccacgcgctcctgatggacgccgtcgcccacgagctgcgcatccggccgggcgtgatgcacgtgacgctggcccacgcccacctgtacgagtcgcactggcagatggcggcggagatgctccagcacgagcccgtggtgccgcagctcccgctgccgggctggacgctgagccaggtcgagcagcaccccgacgactacgtggtccgctacgccgaggaggcgaagcagcaccagtggcccgcgtacaacccgaagcccgaggtcattgagtgatggaggtgccgaccaagcgatcccaggaacagtgggatgggttcttctaccgcatggccgtactggccgcggccatgtcgaaggacccggaccgcaaggtcggcgccgtcctcgtgacgcccgaccggcggcaggtctccccggggtacaacggcttcccgccggacgtgcccgacctgccgtcgctcctggccgaccgcgccttcaagctggccaacatggtccatgccgaggacaactgcctccggcaggcaccgttccccacggcgggctgcaccgtctacgtgacctcgttcccctgcctcccgtgcgcctgcaagctgagggaggcgggcatccgccgcctggtggcaccgaggcccgacctcggccaccatcggtggggcaagtcctgggccacgtcgatcgcggtgctcaccctcgccgggatccacatcacctacctagaggagtacaaccaatgcgactgctgctagcttcatccatcgacggctacctggccagcggtgccgacgacgacatgcgctggacaggcaagacggacaaggccatcttccgcctgctcaccatgtcgaacgccaacgacgtcctgctcgccgggtcgacgaccttcgaccagatgccccgcctgccgaaccgctccatggttcgcatcacccgcgcgcccgacgccgagaacctcggccttggcaagtccctggggcaggcccagctggaccacccggacgcatggctcatcggcggcccgaccctggcgctcgccgcgctcaggctgggctacgtgacccgggcgttcatcaccgtcgtgccaacggagctcggcggcggcatgcacgccggcgagctggccgagttcctgcccaacaacggcgacacgccggtgcagatctccgtcggggacgtcaaggtgcgcgtcttcaccgaggacatgaagtggcccgggaggtaaggctctgggagtggctgcgggaccggctgaagggcaccgccggcctgcacatgcggcgggtcgagaacctggtgagctcgggcgacccggacgtggacgggtgctggaacggcctgtacttcgagctcgagctgaagggctgcgaccggcccaagcgcggcggcaagctcggcttcgaggtcaggcaggcccaggtcgtgtggcacaggaagaggtggcggtgcggcggcaactgctggatctacgcccgggtgggcaagggcaccgacgtgcgccgctacctggtgcccgggttcaaggcccaggaggtggccgacggggtgaccgaggaggagctggccgccatgtcggtgctccgcccggaccacacgccccaggaggtgctggagtttgcgacaaactcattgggcaatcgcagcatgctcgcctagctggaacgatggtgttttggctcggaacgtaagcgcatactgactccgtgctccaccactggggcatgcgacaaccgggcgacgacccggaccgcacactagaacgaaggagaatcagtcatgccgaacaccgcccgcaccatcaaggaggaggtccgcgtcctgggccgccgcaagcgcgccctcacctacccggcgatggtggacatcatcaaggcccgccacccggaggcgaacacctccgtcaagaccgtccagtggtacgcttcccgcctccgccgcgacggcgaggacgtgaacgtcaaggacggccgcaccaccagcaagcccaccgtgcactgagccacggccggggacaaccagtgtcaggggacctgaggggcctccggagacgtccgggggcccttctctttatatgtacggcgcccaaactggccttcgcgaaactttagcaaaataatttgctggagggggctcccatttgggaaaagaccccatataatgacctcacaccaacgcaaacacgtgaggcacgatatgttcgaggtcaagtttggcggtaagcgccacccggcggcaaccctcgccgacgcatccaagctgttcaccgcatggattgatgccaacgacttcggtgcgtccgacctcaagaagtccgacggcttcctctataaggagggcagccgcgcctactacggctacgtctcctacaacggccgcacttggcgcggcgtctacggtcaggagggccacgtggagatcttcgaccgcgtgatcgagaccacggcggactacgtgcctcccactgaggaggcacctgcggccacggtcgccatcgcgaagccgaagaccatcgctgacgtgatccgcgcgggcatctcggcgggcctcgataacgcggcggtgctcgccgaggtcaagaaggccttcccggaaggcagcacctccgccgcctgcgtgtcctactaccgctcgaagatgaagaagtcgcccgccgccaaggccttggcggcccccacggaagcccgcaaggtcaaggtggagctcaagtccgtcgagtacctcgtgaaggagtggcgtcagggcttcaccgccaaggtgtacgtcgacggcaaggcctactgcaccgtcatcgacatggacgacgaggcgtctccccacttcgagttctcccgcatcgacgcctacaagctgctcgacattgtggagctgcgttcgatggcggctgacatcctcgcgaagagggagtacgaccgcctcacgaagggcaaggtctgcatcatgaaggactccaagctgtacaccatcaagggtgccagcgaagagctcgtccgtcagaagaaccccaccgccaccgtcatcaatggcatgaccgttgcacagttccgacaggtcctcaagactgttgaagccgcacagtaaccccatcattcaagcgcggtagcccaagtgttgggactatcgcgcccacaacccgccataatggaacccatcgacggcacgcactgcgtcctcgatccaaccgacccgtccaaggagatcaccatgaacctgtccaacgaatccaacatcgcagacatcgccgcccgccacaacgagctgagcggcaagggcgccgaccccaagagcctcgcgaagcgcggcaaggccaagctgctcgagcagatcgccgcgatggaggccgacaagactgaggccgccatcgtcgagctcgccggcacccccacccccgagctgtcggagaagatcgagaaggcgaaggaggagcccaacggcctggccatgctgctcacgcagatgaccaacaaggcctccaagcccgccaagccgaagaaggagaaggccgcgaaggagaagaaggagaaaggccccgtgatccgcgtcgtggctgagggcctgctgctcgaggtcatcagcaaggacgaggacggccgcccctacggtcactcctacgagaccatcctcgacaagatccgcgagcagttcgacggcgccaagacctccgtggcatgcctccgctggtatgccgtccacatgcgcgagcgcggcgagaaggtgccgaaccgcccgcgcgcccagcccaagaaggagggctaatgtcacagatgagaacgtacatcgtgggctccgtgcaccacaagggggcccgcgaggcgatcgccgacctgaggaccgacgaggtcctcaccctcaggcgggagccgcacaaccagtacgaccgcaacgccgtggccgtgtacgacgcctgcgggcagatgctgggctacatcccgaggcaggacgcgcccgccgtggcgaaggtcctcgatctcaagctgcccgccgtggcgaagtgccgcgccaagggcaccacttccgtagagataaactgggagaccaaacagtatgagcagcaaccgtaacgacacgatcgacctgctggcccgcctcctgtcgggagacgtctgcccgcacgagattcagctgcagcgggtgaccgccctgctcggcatcgtggcgtcccgcacgcccggcggcctggtcgtgacccgcgaggagctcgagcagataggcggcaagttcatcggcatcgagcaggaccccgactccggcgagatccgcatcaccgcaggcgagccgcccgccgaagcgccccagcccacccaccccgcgccggcaacccgccagtaacggccacggttcaaggagagacccacatgccccgccactacctagcacaagccctctgcgtcctcgccgtccttgccatgggcgtcctcctcatcaggacgttcgcgcaggcgctcgaccgccccatcgtacacgtctcctggcacaccaaggagtgcgtccaggtcgaggaccccaaggccgagtacgagggcaagaagtccgagtggagctgcgagcacatgccggaaaagtaccagcgcgtgtgggtctactgacggcgtcgaccgcgccggggtcacgccatgatgcctcccaggaactgtccctgggaggcatcatcgtatgtgcgagctggatgagggaaatgacgacgggctgcgggccgcgaggggcataaccctggcggtcgggctgagcgtggtgttctgggccgtggtcgtcggctcggtcgtgctcgcccgaggctgccacggcgtgccttctgggcattccaggccggccctggcatccaaggcggcctaggcccggggcctaggacgagtcaggccgcccgaaggcggcctgactgtctgagatccagaaaaagccaccgcccggaggcggtggaaggggatgcctggagaaggaggaagccaggcacccgccgcggggctcacttgctgaagatctccttgacgcccatcacaagggcgcccaccatgcctgacacgacgatgccgagcatggtcagcagggtcttgcgcttcagggtctcggtggtgctgcgccactcgcgcaggtgctggaagtccttctgcacctcgatggggtcgtcgaccttcaggccgagcatgaggaacgtctcccgcacagcctcacgaatgagcgccctggcctcgtctggggtgagattgtggagctgctgctccgggccgggcgtctgtgcggtcacttggattccccctggggcttgtcggtctggcggctgtcgcggtagaagtcgagctgccaggaggcctccttagcccagcggatcgtctccgccaggttgcgggagagcgactcgtacccccgagccgttacggcgaagagggtctcgccgtcgacctggaccagccgccactgtacggactcagtccgtacgggctggggctttggcaggacgggcagcgggggctgcttgggctccgccggcgggtccaccctgggtggattgctcgagcaggcggaaagcatcagcagtgccagcattgatgcgagactgtatgagacccggcttcgccctggcgagcgcgccgaggtcgtgctttgacaggacatccgtcagcttcctcgtggtttcgccagcctcacgctggacagtggagaatcgttcgagcgactccgcctggatcttggcggcatcatcccacttgtctatggcgagttccagggcgtccgccctggccttctccgccgccttgccctgctcgagggctgcaacctgggcgctgagctcggccttgtcctcgaccaggccgtcgtaatggcggtatgatagcacgatggtcgtgaccaaagcaaccccgataagcgcgccagcgccgagcttgtatcccaacggaatcatgtcaccctcctaggggtagatgttggcgggcagctcgaagtgaggcccgtccaggaacgccttctttcccatagccttgcggcggcccacgtactcggcgacctcgtcctcggggtcggccaggtcggccagcgcgcggtcccagaccccgccccagcggatgggcacgttcagctcgaggctggcctggcgtaccgccatggcgaccttgtagcagagggaccagtcccaccgcagctcagccttgccgtccccgtcgaagtcgatcagcggcacgaggtcgaccgcgtggccgaggccgtcccggccgggcaggtgccgcgagtccatggtctggctggcgccgcgcgccaccagggtcgcctggcgctccctggtgcgcaggccctcgtagacctggaagtccacgccggtcagctggattgcgcgctccaccaccttgacgaggtgggggtgcacgcccctcaggctggcgcgcgacttggtacccagtgcgaagctcatggtatgtcctccattctctgcgatgcccctggtgccggggcgggcttgccggcattccctgccggggtcttcagcttggctcgggccagggagacgtcctcccaggtggcgccgaacacgtaggacccgacgatgctgatgagcgtcaggaacgccatcgtgattgccgtgtccgccggcccggaggccaggttcttgtacagcacgtacccgatgacccacatgcagaaggccgacacggcgaacatgaagcgccgccgcaccctccagctcgacttccagttctcgttgcggtcggtcacggcgtaatctccgtccatacgaagtcgcccccaggcccggtcggctgaccgaggtaggccctgttgctgaggaaggcgggcggcgtgacgctgcgccaggcggtgccgtccgagatgttggacgtgcccgcgccgttcggcgacgagctgcctggcaccgtgccggtgacgaccgtgatgctgccgtcgttgtagaggccgacctcccacagattgtcgttgctgttgccagtgttggaggagccctcgtatcggatcaggaagcaggcgccagacagcacgggcccggcgaagacgttctggtaggaccggtcggccgcgttgatgagcagcgcccgtcccgggttggtgggcgacagcccagagtacgcgctcgacccgaagccgaagtccacgtggctgttggagctgatgtagatgttgttctggaacgtcaggccgaacagcgggaactggaacggcagcgccggcagcacggtgttgctgtcgtccacctggccggaccagacgttgttcaggccggtacggccgttgagcgtgttcaggtagccgataccgccggcgacctcgccagaccaggtcaccgaggccgtgccgtagatggagccggtggcggtgatggtgaacgagtaggcctcgccatcggtcgtcggggtgccagacagcaggcccgaggagctgagggcgactccgtcgggcagggccccggagctgaccgagaacgccggggccccgaccaggtacgccgtggtgagctgcaaggacaccgccacgtcgacggtgaagctcggcgcggtattgcggatgcggcccggcacgctcggcagggcctgcagcctgtcgaagatcagggcgttctggaccggggcaccgtcggggtcgaaggcgatcgcgaagaacccggcggtctcgggcagcaggttgccgaccctgaaggatccgtccaggccggtcagggccgcgccggcgggcatgccggtccgcctggcgtacaggcgcaccaggcagtttgccagcggcgagtccacgccgtttagcctctgcttcaccgtgccgccgaccgcgtacaccgcggccggctcggcgccgacgggcctcggacctccggcccaggacggggtgcccggcacggccgtcggcaccctgtagcgcacgaagccccgccccatgaggggccgaggtgacggcacggccgtctgccgcgccgagggtcgggcgtagctgctgtaggccgaggggttgggcccgcggagcgaccccagcccgtacgaagcgccaattgcgcccaggtcggccacggtcagctccaggtgtccgaggtctcgatgacggcgcgaccctcgtactggcggaacgccaggaaggtcttgccggccaggtcgccctcgccctggaaggtgtcgccggtgttcagcacgtactgcagcggggcccacagcccgggcatcttgccgagcagggccgccatgttcgtgccgcccggctcgtggatccagaccggggacatcatcagggcgccgtcggggccgtgcgggtagctgaggctgccgttgcctccccagttgccggagccggacagcgagtagtcgtggcggcggccgagctgcacggggccgcccaggccggtgtaggacctcacggcgtagaggccgggcgcacccgagctgacgctgtacgagacgaagggctcctgttcggaggtggtcgggctgctgctggccttgccctggatgcaggtgttgaaagtgttggcaggggagtacgcgtcgtagtccccgaaccagtagaactcccggtactgggtattgctcgagccggcgtccgggtagttctggaggtacaggtacatcatcttctcgttcgcgacgagcacccacggccggccggccgaggtgctgccggtgtagtgcacgtgccagtacagaccgcccgggatcaggtcgttggtgggccagcgaccgtcgcccgcatcgatgccggtcatggtgtccatgccgtacacgcgggcggcgtacgtcgacgagcctcgggtgtcgtccacgtacaggtaccggccgcggctgcccgcgccggtcttgaaggccgcacggttggtggcggtaaagggcttggtccagccggcgccggccttggagccgtagccgtcgaccaggcacttggtgagcaggttgagcagatcgccggcgttcgagccggtcagcacgggcgcgctcgggtcggagctggagtacactcggacggtcatggggtttcctcagatggttagtaggatcatgaagttcgacgggagcgggtccgtcgtgcccccgccgccgtccgtgccaaatacgaagcccagggtcagggcctggggcggatcgtacgtgccgtcgaacaggaacggcacgctcagtgcctggggcggctggtactcgtccatgggctatatcccgggaacgatggagaccaggtcgtatcgtgcgtcttcaccgtcgtagacgaaaccaaccttgtccgcgcgcgacccggtctgggtcacggcgtacgcctggatcagggagttgaaccggaccacgccggagggcagcccgacctggcaccctcccgccggcggctggcgcagcttcaagacgcagccctggccgtcgatggccccggtgaagctcagcaccaccgtggccgtgagggagatccggatctcgtcgtactggccccagtcgcactcgaaggtgcctgcgtcggtgtcggccacgtgctggatgcggcgggcgtacggcgtgccggggttgccggggtcgcccttgtcacccttgtcgccgggctcgcccttcagcgaggccagccagtccgggatcgtgccgacgaagccgccgtcgacggcgatctcgtaggcgctcttgccgtcggccccgtcgtcgccgtccgcgccgcgcaggttgtccagggagaccaggttgatccaggacgtgtccccgacgtagttccactggatgtacccgtcggccgcccgcagctgcaccggcttgccgtcggaggcgaagaagtcgagctcgctccacttcttggtgccgtcgccgaccttcagcttgacggcctggccggggtccagcaggaagccgatctcgccgttccagaggaccgggtccttgctgttccagttcgccgacgtgtcacggcgctgggcaaatcgctggggtactacgatggttgccatcaggctccgcctccgtcaaagatgacctcgtcgggggtccaggtgcccgccgtgatggtgctctcggtcgtcccgactgccgccgtgtaggcgaaggtgcggcggtggcggttgatgctctcgcccgcgtcggtgatcgagtacagctccatcgtgacgttgccggtgtacgccaggttgccggtcgccgaggtgccgctgatgttatcgcgagcgaccagcaccgcgccgccagcgtccaggaacctcatcccgtaccgcgtcccggtctccgggccgatcgaggcggcgtcctgggtcggcaggacgtcgccggtctgctgcgtgcggtctcggtgcgcccaggtgacggacaccgggccggccgcggtcgcgggcttcctggcgccgtcgacgcgcaccaggcccggcgggtagggcctcgcctgccgcgccaggatcggggtgacgtcggtcggggccgactccagggcgagctggccccgggccgcgttcgtcagcagcttgacggacacctgctcgccgctggcgtactcggtcgagtccatgccggtgtgctcgccgccctggcccagcacgatcaggcgggcgccggacgcgaccgggagcggcagggagtccagcacgccgcgccggaccgtgacctgcgtgtcggtgaaggagacgatctggacgatctccttggcgttcgaggggccgtagccgatgaccgccaggtcgcccgcctcgacgatggtccagtcggtcgtcgcacccagggccatgacggtggtctcggggctgtcgtcgtaggcggcgctgatgacggcggtggggcagaagctcaggtccgtctggtcggcgtagcccgcgccggcgctgacgtacatcgccatgttcatcgaggtcccgccgggcgagacgcccgcggccagggcgtagccggccgtcttcggcagctgctgggcctgggcgtcgccgatctcccggacgagcaggtagtacggggtgtccatcgccaggcggtagggcgacggcagggcctcgccgctcgggggctgccactcggagggcggcggcggggcgtaggacgccgaggtgagcgagaacacgtcctcgacgacggagagcttgatctggttgctctgcagctcgcccagctcgatgttggtcacccggaaaacgatgttctccacgccgtactccgcccaggagaagcggaacacgtcgccgatgttcagggacgccgcggcgcgggtcgcgtacagggtggcggtggccagcggggtggacagggccttcaggtcgcgggcggcggccacggtcgcgatcgagccgttggtgaagcccgggtactggatggtcgtgccgaccgtgctgccctggttggcggctagggcgatgtcctgcacggtgatggagccgtccttgccggtcgacttctcccagtacgccacgctgacctggttggtcagctcgtcaaccgtgcggcgcttgaagtcggagacgcggatcacgttctcctcgtccagcaccatcagggtgctctcgtcgtacccgcctcgggccagcttgagcacgaagcggccggtcgaccggtcggtgtacagcgagccgtcgatgtggcggagcacgatcgccaggaagtcgctcaggtcctgctgggtgtcccagagcagggacatgcccatggactccgagtgcagctggtcggcggccaggcggaacgcggtctcgtccatgtcgccctcggggtagcccatgccccagtccgggtcggtcagcacctcgcggacgatgtgggccgggttcatgtcgccgtcgccgatctcggccttggcgtcgtaccactgggccaggccgttctgccgggtgtgcacgcgggtagccctgaaggcccagagcttgaggtacgggttgttgcccaggtagacgcggcggagcaccacgcccagtacccggcggaaggccgggattgcgccgccgagctggccggccaggtaggtgttggcgacctggtcgtccttgcccatcatgacgtcgaccgtgccggcgctggccgcgatcggcgtggtggacgggtccagcggcgggtcgatgcggtcgccgtaggacttgttgaggtagtccagcatgaagccgccgatgccgccctcccgctccttgccgccgaacaggttcggggcgcagaccatgatctggccgccggtcgagctgcccttccaggccagcttgtcgtccacccggatctcggtcagcttgtcgaccggcccgtggcacaggaccatgtgcatgcccaggaagtacttgtacccgatggtctgcttcttaccgccgcccatttttggactcctctacgacggccagggccatgccgtccccggtctccgccagcttgtctgcgtcgatgccgtcccggaggaaggcgctgtagtccagcccgtggcgctggaagaatgagcgaacgccggcggagcagtagcccagccggcgcatgtgttccatccgcaccacggcgcggtcgtccgtcacttcttgccgcccttggccttgatggcctcggtccggaagtccccgtaccagcacacgttggggcccttcaggtccctcgtgccgaacagcaccgggatggcccgcccgacctcggccgtcggggcggtgatgtccccgaggccggccggcttggcgttctgcggcttgggcatcatcgcgtaggacgcgacgagggccacgatgaagactacgatataccaccaaatcatgctagtaacctctcagacgatggagcttccgtcgaacgggttgcgcgtcgggatccacgggaacccgccgaagttgggcaggttgttgaacttggcggcgcacgtcgtcttcaggtggttgcagcccgggtacagcctgaccgcctggtcgcccgcgaggctggccagcggcctggacagcacgaccgtgccgccggtgtggctcacgatgaagcgggcagcgccgtcgggcgccaccaggatgccgccggcgaaccacccgtcctcgtagttgccctcgacgcccgacaccacgacgttgaggccctggctcatgccgatgaccgtgccgttgtgccggtagctctcccggttgacgttgcagccccggccgtacagtacgtggcggcagccgtactcgaacttggcgcgcagccccgggcggcggatcgaggtgtagaccggctcgcactcgaggtcgatggcggagtcggcggcagaggcgctgagcacgcgccccttccagtagatcacgaactgctggtccgggtcgccgtagtggccgcggtagatggtgagggaggtcacctcctcgggggagaacccgaggaactggctggcgaactcgtcgtcccgcgggaacttgaccttgatgccgttcttgaagatgtccgtcgactgcttgacccggtcgcgggagacgctggacggcttgtacaccacgccgtcccgcaccacctcgaaggccccggaggcgaaggcccaccgctgcagcccctgggtgaactcgtacagctctaccggcgccccctgctccctggaggcctctatcgttgcgtagctcatcagtctccctcgggcgtttcgatgacggggatcgtgctgctgcagcggcccgcgtatgagtgggtgatctcgacgctgtcggagtccaggcgcacgtggcgcatgaagcagagcaggtcaatctcggacgtagcgaagcccctgccgaagccggcagcgagcgacagaacctcgttgccgtccgtgtcggtcgagccggacagcacgcggttgtacagcaccgtgccgtcggtcagcacgagcatgaggtcggtgaccccgtagtagagggggtagccgatcgggcgcaccgtcagggcggtggcggccgagtcgacgttggtgagcacctgtaggtcccggttccagctcggcagccagaagcccttctgcttgccgcggcgggcgtggagccaggtgcggtagcgccaggcctcggccctcgacagcgcgtccagcccgatggtctgggtgctctctgggtagccccgctgcgggtcgacggtgatcgggccggacccgttgtcgaactggtccaccggccggatgatcttctccgacaggtcggacagcatgactgacctgtccatgagcacgtcgcgcccccggtactgcggcagcccggcggacgcggccaggtccacgttgttcgtcaccaggaactccacgcgggcctgggtcatgtcgtcgggccgacgggcgaactcggacccgttcagggtgcgggcgtaccggagcggcatcacgtaggcgttctcgaaggagcgcccggtcgggacctttagctccaggccggaggcgtccgcgctcagcacctcgacggtcagcagggtctcgtcgtcctgccacagcagggcaatgtcgttgttccggtagtcggcgctggacgcgtcgaagtcgaggcgggtctggccctccaggacggtgccgaggcgggtgacctcgccccagaccgggacgccgtacacccggtgggcccactgcgtgctgatggccttggcccgggagaactggtgcgggtcgagctggaactcgtacaggaagcgctgcctgggggccgtgcggagcgccaggcgctgctcggacgagtaggcctgcagcaggtccgtctgccactccagggactccctgaacttcgtctgggggatgaagggccagagcacgacgcggcggccggagagccgcagggtcggctcctcgtcgccgaagtcgaagacgtactggcccgcgatcgtcggcgcgccgttggtcgagatgctgacctggtagatgcgggactccagggcgccgaacgtggtcggcggcgcctcgggctgggtcagcgtcacgccgtccaggccctgggaggtgatggcctccagggtgcggccgtcgaagtgggcgttccagacctctacggcccgcgtctggctggacagcaggttgcccaggtcgatcacgccgggccggatgtgcacgcgatagtacaggtcatccacgaagccgccgacgcggcggtccgatccgaaagacggaggagcgagcacggcgacgggcggcgccggcggcagggccagccgcgaggcgcgcgagtgcctgggctccacaatgggaaagccccaggggtaggtccatgcccccagggtgctcgaggtgtccagcgccgaggcgtccggcgtcggggtcaccaccctcaaaacgccggtcatctgcaccactgccatgtcaggcctccttcaggatggcgtacccgcgctggccggtcgcgccgcccttctggtagtacgggaagaccttccaggtgtcggatccgagggtgaactcgtcgccgggcacgtagttggtcatctccagccggcgcatgtgggcgatctcgccgtagggcgaggcgaactggttgccccggccgatgtacacggtctggcgcagcagggccgtctgccagccgagagcgctcggggtgtactggcgcaggccctcgtcgtagtacgactggccgatggcggccagcggtccgtaggtggacgtgtccgccgtgtacctggaggcggcccagccgttgttggagtccacgttgcatcgcacgaagctggcggagtcactcccccgctggtagcccatgcggaacgggatcagctcgttctgctgcgacgagtccgggccgtagccgctctgctcgtagtacgcccaggtcggggtggtgctcgtgccgccgaaccaggcgccgcccagggccgccgagctgaacttggagaggctgccgaagcccagcatctggaagcggccggtgcggtactccacgacggcgaagatgtcgtccgagtcggagtaggagaagaagtggtaggccggcacggcagccgtcatctccgagatcatgcagccccgggtgtagccgttgtagctgggcgcgccgggctggcggaatgcccctcggccggtgtccgcgccgtcgtacccgtcggccatgctgagcgccaggcaggagtaggagttgctggagctctgggtgtacccgttcaggttgtcgttgagggcggaggtgccctggtgggagcacaggccgacgaagagcccgttcttctgcaggttgaggcgcgccgtctggcccacgccgtcccaccggttgacggtccagcctgccgcgatgcagaagagccggagcttgtccagcaggtcggcgacgctcgttgcggccccggtctcgtatgccatgtctatgtcactccgccttgagggcccagtactcgcgtacgtcggttcggtaggtgttctggaagaccacgtagtcctccccttcgatggtgccggtgttctcggagccgttctggaaccccgagatctggaagcagccgtccagctcgcccaggaaccgccccgacggctggcgctggaacagggtcgatggcaggacggtgaagccgccgccgacgttctcccggatgccgtagccggcgctgctcgaggagttgttgccgtcgaacatcccgtgcggcagcacggagccaggggagctggaccaccgggagtacgactcggactgcccgccggagctcggcctgttgtgcaggtcgaaccaggacccgtccggcagcatcacgttgagggtggtgctgaacgccgccacttcgctggccgagacgctgttgtagctgcccggcatcgggaaggcgctgtgcgcggccgacacgaagtcgtaccggtagctgtccgagcggggcgacatggagccgccgatcgccatcgggtacgggtactgctgtggcgaggcgtagggcaggaagaacccggcgtaccccgcctcgaagacggtcgacaccttgaacacgaacaccacgcggcggccgctgccaacgaaccagaagggcatggaggcgccccagaggggcacgaccggccacccgctcgggtgcaggccgggctggcggtgcggggactgctcgttcggcaggtagccggtcagcccctgcaccatcatgaagtactcgcccgtgccggtgttgtagctggtgcggaaggccgcgaagatctcctcgtcgcccgccaggcccgggcccttgaccaccaggtaggactccgaggacgataccagctccgagccgtcgtacagccacagggaccggagctcccactgggagccggtcagggtgccgccgtagtcgccggtctgcttggtgaccaggcgccaccacaggtgctcgcccgtggcggagggcacggtgaaggcgcgctcctcgttggcggtccaggcgcgctgctcggtgacgtccagggcggtggaccacgcgctgccgtcgtccgagtactccagccggaagttgcgcggcgtgtagttacggacgttcgagctctgcccggccttgagggtgaaccgcgtcacggcccgcgctgcgcgcatcttcaggcgtacgtactggtccggggtgaacgacgtcgacgacaggtactgaccgttggcgtcgtcgttgtagttctgggtccggaagtccggccggaacatgcgatggagggaaacgcccgagctgaacggcagggtcgtgtccacggagtccaggttgtcggggacccaccgcagctgctgccaggtctgcccggcggctaccaggctctcgttggcggtcaggaacaggcgcagcttgtccagcgcgtccacgtggttggcggccgtgcccgttgcgaaggccatctgaatctcctcggttagtagcccagcgagctcttgttgcggttgacgacgttcatgatgagcttctccccctcgtccgtgccgaggtagtcgcccaccaggctcgggtccagcacgttcacgttcttcacgtgcacctgcggtgccatctgcgcgggctggttgccgccgtccgggtatgaccggccggtcagctccctgccgcgcaccgaggcggggcccttcaccagctccgggccgtactcgccgacgatgccgaccttgccggccgggatctggccgccctggtcgtacgcgccggcgaactgcgccccgttgatctgggagatgatcgaggcgccggtggcggcgacccgggccatctcagccaggttggccgggaagcccagctcctgggccttggcgaggccggtcgagatggacatggcggcctgggcgacgctgaaggccttgctcacggcgaatagtaccttgtaggccttggactgctcgccagcgtaacccttggccagcccagcgaggccgtcgaacagcgtggccgcgccctgcagctgggtctggatgcgctgcgtctccatctgggcctgctcctcggtgaactgcttctggaggcggcgcagcaggtcctgccgctccagctccgtcaccgactcgctatccaggatcagctgcttcttccgctcgtaggactgcttgagcgcctcctcctcggtcaggagggagttgtacaggctgtcccgctcggactggcgctgccgctcggcgtcggccagggccttgtcgcggtccttgacgacctgcgcctccagctccgcccgggccttggagccctcggcggtgttggcgcgcaccatctccatgcgccggtcgtaggactcccggatggcgtcctcctgcttcagcagcgactggcgcagctgctccagctccgagttgccgtaggcgcccagcttcttcagctcggtgtcgcgctcggcgtcgaggcggctcatcagcctggtgcgctcgtcggagcccgccttggtgttggcctcgatgatcgccctgcgcttgtcgtaggaggaccggatggcctcctcctcggtctgcagggactccttgagccgggcgaactcctgctcccggcgcttggcctcggcggccgcggccttgtccacgcccgacgaggcgggcttctggcggtcgccgccgatgcggaactgtgccaggcggtccgtgccggccgccgccttcttcttggcctcctgggccttgtcgtactcctcgcgcaggcgcttggcggcctccagctgctcgttgctggacttgagggtcgcgtcgcgctcgtccaggatcgcagagatggactccatgcggacctgggagaggcgctcctgctccgccacgaaccgcttcatcgaggcggcgatggtgtcgtcggtgaagatggccttgatgctgtcccgccagaactcggcgccggcgatcatcctgtcgatgccggaggcgaactcgacggtcaggatctggaccatcgcgcgcaggttggagggcagctccttgaaggcgctgatgaggaagtcgacgacggactcgccctcgtcctcccactggccgaagttgtccttgatgaactgggtgacgatgtcgatggacttctcgatgtccgtgccccagacctcccactggacggtctgcgacttgagcagcgcctccatctggcccgacgcgatcatgtcggtcagctcctggagggcgtcggtcgcggtgcgcacggaggcctcgatggcgtcgccgatgccggactggctgatggtcagccacagctggtcccaggtgtcgcccaggttcgccatggcgccgtcgagcgagtccatgcggcgctccatcgcgccggcgaactcgttctcgcccaggtccgtcaggtacttctcgatctcggccgcgttgttgccgatggtggtggcgacgccccggaaggtcagggtgacctggtcaccctgctgcttcgccttgatgccgaactccttcaggcgctcgaactctccggtggcggcgtcggccaccgcctcgatcatctggttgaggtccttgcccatcgcactggcggtgttgccgtacgacatgagcgccttctcgctcggatcgaggcccaggttcaccagcttggtgaagccgtcgacggcctggttcaggtcgtagggcgtgttctgggcgaactcgcgcagggcgtcgaaggcgatggccgccttctcggaggagccggtggcggtgatgaggcccgcgttcagcacgtcgaactggcgttgcacgtccaccagcttgttcagggtgcccattacgctgacggccgcggccagcggccccagcagcttggtgaaggcccccatgaggcccgcggtggccttctcggccccgccgccggcggagctcaggcccttgagtcgcccctcggcctgctggacctggagcgactcgatcttgattgccagactggcgacgtcagttgccacggttgttcaccttccagaaaatgcggtcgagggacttgatgaggtccgcctcccagcccagcagaggcttgccggtcatctgcgaccaagcctgcatctcctggaaggtgagcggcaccccggcgaacacctcacggaaccactcccagatgtacccgagctcctccgggagctcgggcgcatcctccagctgaggcggcttgcgcttcagcgtcttccacacctgcatgagggacgcacgcagggtctgcttacttcccttcgggatcaggtcgagcttgaactcgtgctctgcgaaggctgcgagctgctcgacccggctgcgaaaaaaagggcgcgcttggacgccgcgacgtcgatggagtccatgatctggggcgcctcgacgaagaaggcctccacgttgtcgacggtgcacggctggtcgaacgaccaggcgaccacgaggtgagcggtgaggcggcgcttcgccttggcgatctcggccgcccgctcgacctgggagtcgagctgggcgatccggatcgcgtcccggcgggcctcagcgtcggcctgccggaacgcgtccgagtcgatgccgcggatgcggacccagtgctcgctcttcgtgccgtccgggcgccacagggggacctggatcccctcgttggcggtgccgcgggtgaagaactcgttcatgccagccgcccccgcggcgttgttattgttctggtccatggcttatgcgggcaccttgtcgatgatgatgttggactgggtcacgctgtccaggagggcctggaacggcatgctcagggtgatcgggccctcgccctcgacgtccggctggccgccgttgtacttgatgcggggcagggtgaagacgtacttgttgcctgcgccgtccgggagctcgaagacgatcgaggactcggtctcgttgatgaacttgtccagcagcagggagttctcgaagtacgccgtgatggtgcccgacacgttcgaccggccgatggacggcaggatcgacttcttggagcccaccacgaagcgcgcctccaggccgttctccaggttcagctggatctcggtgatgacggcgatcggcgtgccgttctcgttcagggtaccggtgaacgagtccagcggcgaggtggtcgtcggtgcggcgtaggtcgcgccggcgatgatggcctgggcggtggacatgtccgagccgaccgtgccgaaggtgccggtaatcatcgcgttggcgctgatggccagcgccagggtgttcagctcgacgccggtgaagcggtggtacggcttgtcggccgtcgcgatgtcaccgaagaagcgctcgacggtgaaggagcggcggaccgtgccggccttcaggcggtcgccgtcgccgcccggggcgccgtctgccacccaggtgcccagggtgacggcctccagcaggtcgtcgaagctgccgaacgagagctcgaagttgatgtccccgcccacctggcgtgcgccgtggcggaagtcggcgatctggcggtcgtcgcggatctcctcggactgcagggactccttggacaggccgagggtggtgcccgtgtggcggatgggcttgaacgcgggggtcgccggggtctgaccgtagacggtctcggcgacgtagcgcatggagtggcggctgccgtttgccatggtggtacgctcctactgtggattagtttcgagagacccgggcgaaccaggtgacggtcatgctcacgcggtaccagccatcgacctcgcgcccgcgtgagcggccgcacgaggccaccgtgagctcgacccccgagtgggcaagtcgcttgcccgccttgaagtagtcagtcagctcgtccgccttggccgtcacggccgcctcgccggtgttgagtgggtagttcaggtcgatctgcaggatgccgtcgtgggcgtcctgaccctcgttgcccagggtggcgacggagggctggttgcccatgatgaagaccgaggcccagggactctggtccgacggcttgtcgaacggggcgttcggcacggcgtagggcagggcgagcggggagtccttgaccccctgacgcagcgccatgtccagcccgctgtaggtgttggtagccattgtccgtccttacctgccgaatgcccgggccttggcggccacgatccgcttccaggaggccacgtgccttcgcaccatgccctccggcgcctgcttgctccacccgtcgtactcgatccgctcgacgtacggcaggttgttcgtgaaccagaccacgtcgaccagcgagcccaggttggcgacggcctccgacatggccgcgccgcctcccaggtcgagccggtcgatcgcggcccagttcggtgagttgatggtcgtctgccagttgccgcgcagccggccggtgtcgaccggcgtcgcgaagatcaccagcttgaagagctcgaggaccgaggcgcggcgcacctggtccaccctcttcagggtcttgacaccgaaccccttcagctgctgctcgaagcgcgccacgttacctccggagctgcagggcgaacagcagggccaggcccgccggatcgaccgagtcgaagtccacgatggcccactgggtgccgctctcctccaggaagacgtcgccctgcttcgggcgctcgaccgcctggatgtagaccagccggtcgccgcggcggatgttctcgccgtcgacctgcttgtcgctgtagtcggttatgacgccgacgaccgggaagtcggtcgggccggagcccggggtgacggtgccgtcgaccgggtcaacaacgaccgggccgcccggacgacggagcctgcaggactggccgaactcggccagcagcgcgtcgacgtcgtccttcatggactggtagtcgaaggtcgccatgtcagcccctcgacagccggccggagttgccggactcgacgaggccggcctgctgcagcgtcatggtgacctccgggaactgcggcgtcgcggccgccaggttggccccggagctctcggcgaacgtggtcgagagctcgatcggaccgaccttcttcgtcacctgggtgaccttctggccgctcgcgtcgaacgtggggtccggcatgagcggcttgcccgagagggcgcggttcgcgaccatgcagaccgccaccgtgagggcgggcggcaggccgcggaggaatgaggtgacgccgccccggggccactgggtgccctggagccggcgtcgctgccagcccacccaagagtaccgggcgtcgaggtaggtcgtcgcgttcacgatcgcctgctcgagctcggtgtccgtcttggcggagaggtcgacgccgcggtccgcccagtaggcgcgcacggtggcggggtcggtgtaggcgttggcgccgtcgaccgtgccgtcgttgtcctgctggttgaatgccatgggtcgatcctctcctgtgggtctgtcaggggcttaggccttggcggccttcgccttggcgcgggtgtagccgtcggcgatcgcgtcgacgtcggcgcgggacggcttcttgccggtcagagcctcgaggcgctcgaggttcggcaggttgttggacgtccagtcctggtcggcggccgggtccagcaggccgatcgcctcagccaggctcggcagcgccggcggggcgggcggctcctgcgtgttggtgttctggcccacggtcgcctggtccgcatcgcccgacggggcgaccacgacctcgcgcaccatcagctcgtcgccctgggtgaacaggtcgccgaagtgggagcgcatggcgccgaccacgtagtccgcgtcggtgttctcgcccggcagggcggcgatggcctcgtccagctgcttgcgggtcggcttgccgccctgcttggagcgcagctcctgcagctcggcctgctcggccggcagggcgccgtagaagccgaagacacgggtgaggctggcgatctgcccgtcgttgccggcgaactcgtactcgccgtcgacgaactcgtgaccgttgacgttcatggtcttgccctggtgcggtcccaccaggacgaagcgctgggtcttgctggacatgatgtccactcctttctcttggcctataggccacgaagccccgccggcgtaccggcagggcccgtggtgctcagttgacggtccgcatcgggatggcggtggcgaggttggcctcgctcagctccaccacgacagcgtcgctccagtagccgtccgggccggggcgagcggcggccgccgcagcgcgggcgtcggccggcttggtggtcgagtcgtccgccacccagacgatgacggcgtcggacttgtcgtacagggtctgcccgcagcgcgagccgctcaggcgtacgaggtgtgcgctcatgtttcctgtctcccattaagcgcccgccggcattgcgccggcgggctaaccgagatcagcgacgccggcggattaggccggggtcacgcccttcagcacggccaggcccttctcgctgaacagcgcgaggccgcagtaccaggagatacgggtgatgctctcgtcggcatcctccttctcgcccacgtacttgacgtgcatgcccgcctgcttctcggcggtcaggccggcgatgccgtgggtgcggctgccgtcgtcgaaggtgccggcgaacaccgaggtggcgttcgtggcggtgccctgggtctgggtgatcgggatccagtcgttgcggaagatcgggatgccgcggtaggccggcacggtgcggcccgacgccatggtgtacacgtcgcccggcgaggtgccgcccagggcgcgcagcagcgccaggtacttgcggcgggtgcgggagtgcatcatcaggtagtcgacctggccgtccttgtcggtgacgaggtcgatcagggcgtccaggtcctcgaaggacaggcccgcgccgttcgccgcgccgttgttggcggtgatggtctggctgcccgcgaccaggctgaacaggccggcgacgttgttgccggtgccgtcgccgttcaccatctggttctggtactggcggccggccgacttggccttggaggcgacctggacggcggtctggtcgttgccgtcgcccgagcgggtggcctggatcagaccgttcacctcggcgtcgccgatgatggtggtcagggtcgaggtcacctgggtgaaggtcgccgggttcttggcggtgatggtcgagccgacgccagccatctggacgtcgcccagcacgttctcgcgattgtaggcgagggcgttgccgtcgatgccgtcgaagggcagctgctcgaagatctcgttgacggtgatgacgttctcgatgacgccagcgacgagctcgtcctgggccagcttcgccgactcggcgagggtaacggatgccattagggttctcctgggaggcgggtggtgggatgcttgggaaaggtgccggatcgcccgacgattcgacccctgggccaaggcatcacgcctctgcagggtcagcgagcgcggcagggtatgaccgtgctcgcgtgctatggttcgggactttgccgtgacaacccgagctcgtaaccccctgaacgctggtccagcgcgagaatctgagcctcctgggcctccggaggcctgcctcagacgagaaaaagctttacggaccaaggacttaagccgtatctgagccgaaacgagccttcggcacgtcgttgtcccaggaaatcggccaggtcccaggtccggccacggctcgaggaacagccctagaaggtctagaaggcctagacggtccagctgcgacaaggacttagaggccgagctgccctagaaggagggtaagactgccttagatacccttatttctttagatctaataaaaagaataaaaatagttctataagggggctcccatatcccaaaagaccccgtataatggactcacaccacggcaacctggtaaacagatggaccgtaagccctcaaccaagatcaaggcaccgcgataccgacaggcctgccctcggcaaccgatgaaccgggaactgtggcgcggtctgtttgaagaggcacgcagcctgcatggcagaccgctcgaggggctcacgtccgtcgacgacggtcgagcgtggttccaaattgcgggcgacgcaacgccctactccgtcctcctgtctgaggacgaactcaagatgttccacctctgaggtagacatgaacaagcccaccaccgagaaggccatcgccttcatggcaaagaatcccacctacttcggctcggccggcggggtggacctgtacgagcaccccaccctcggcgacgagtcgcccatcatggctatcacggcggacggtcgcgtcaagcgcacccacctgtgggacatgtccggcgtcgagtccgaggccgacgagctgaggaacctgtgatgaccgtcaagtacaagaacctggaagacacgcccatcgaggacctcgcgcaggtgatgcagctgctgcgcgacctcgagatagcgcccaccaccgtcatggcctacgccacggcgctcgacgccatcgagacggcggaaggggccttcaccaccgtcgaggttgccctcaacgacaacgccatgatcgaggcggaggacatggacttgcataggacgatcttcgagggcgcagagtcgttcctcaaggtcatgggagagatgtgatggcggccttctcgtgcaacgtctgcggtcagggcttcgacttcggggactgccggtgcgactccctgcccgaccctcagccctccggcggactgccgtccgtcgaggcgctggccgaagccttcgtgcgcctcctgaggatgaacctcgggcaggacgtctacgacaccgtcgtggacctcaactccagggagctgaaccccgacgtgtgccactcgggggacttctgcgactccaacatggtgatggacgccgccttcggggagctcggcgtcgacccgtcttcctacggccgcgaggacgaggacgacggcatgccgcaggaggtctgcgacctgtggaacagtgcgtgggaccgcgccaaggtcctcatgcaggagcgccgtaccccctaaacagtggcattgtaccacctaattgggcgtcatgatgcccgtgtccctaccaaccaaggagagtcccatgaacttcgaagacctgtacctgatccctgacgactacctcgacgccttcgccgaggccgcgttctccctgatcgtctcgcgcttccgccagccgtcccacgccatcgccgtcaagcgcggctggtcgacgctggtgggcaactccgcccacccgacggcggccccgcgcggcggtgccccgtggacggaggccgaggagcgcgacctcctcgtggccgccgccggcaagatcaacctgaccaagctgtcgagggcgcacggccgcaccgagcacgcaatcgcctgccgcctggagcagctcggcgtggaccgcctcctgatcgtggcctccgacttcgagcccgtcgaggcgcccaagcctgccccgcccaagccccgcatgaccccgacctcgccagagtcccgcctacgcaccctgctgacgatcgccatgggcttctccagcgccgagcacgtccgtggcctgcccccgccggacatcacgttcctggtggcggacgacctgatcgacttcgacccgaccggcaagcagcccccgagcctgacggagaagggccgacaggtcgttgactccgtcgtgggccgctcgaccggccgtaagcgcgccgacctggcctggaaccccagccgcggaacctcggagatcactgacgggcgattctacatggtggcctccggcgacgtctacaaggacggctgcgcggccggccgacctgcgctgaagaacccgccgaaggccgtccacttcaacggcgccaccgccgacggagaggccgtgcgcctcgccaacctccacccggggacgcgcttcttcgtcctgcaggcggtgtccgtgcaccaggcccccgagcccgtgctcccgcccgcggtctcgaagcgagtctgacggtacactgtaaccccctgatccgcaaggagttttcccatgcaagagaaatacgaccgctacaccctgttctacggcggggtgttcagccagtggtacccgtcgcccatggtgatcgacggcgtggagtacggctgcgccgagcagtacatgatggcccagaaggcgagggtcttcggtgacgagcaggcgctggacgagatcatggcgacccagagcccggccgagcagaaggccatcggccgccgcgtcaggggcttcgaccgccgccagtgggactcggtgtcccgcgacgtcgtgatgcgggccagcctgcacaagttcaccagcaacccgaagctgcgggcgcagctcctcctgacggagggcaccctcctggtcgaggcaagcccgacggacgtcatatggggcatcggcctggacgagcgggatccccgctgccacgacccgagggagtggcggggcaccaactggctcggccaggtcctgacggacctgcgggagagcctcacggtgctgtcgctgtaaagagaaagggcgccctgaggcgccctttccttttgcccagccgttcggttactggcggcgcttggcaaggccagcggcgatcttctggttgggggtcagctcgccctggcgctgtacgggcttctggttgccggagcccggcggcttgccgccgccgttgggcgcctcgctctcgaaggcccggccgaaggtctggtggcccttcagctccttgaccaggtcctcgaccgtcatgaagccgcccgaggcgttgccgcgcgggtcgcccgagtcgtcgaccacgcggaccacgtagtcctcgccgtccttgacgaccttggtgcgggcggtgatgtgcggcagcagcaggtccggcacgcccttgtgggcggcgatcgcctggaccgcggcggaggtcaccaggtacttctgcagggacttgcccatgccctggatctcggcgtccttcgcctgcagcttggtgttgaagccgctctccagggactgcttcatcttgtcccagttgaccttgccgtccttcgactccgagatcagcttctcgacgcctgcgcgcagggtctcggcgttcatggcgtcgtcgccctcgatgccgagcagctggccgatctgggcgaagcccgagacgtccgggcggttgcgcttggcctcgtcggcgtcgcggcgggccgccttcagggacttgttcaggccgtccaccgcggtggcggtgcccttgaagctgtcctgcaggacgtagccgccctcgccctctccgtagaagccgcggaactgctccgggaccttgtcgatgctgtcgacggtggggttcttcaggaactcgaagtccatcttatctccttctgcgcatcacgcgctggctgttgggcgtcgcgcccggggtgtataggctggcaccttaccgccggcgccgggcccacgcaagccaacgttcaagcagaaagagaaagcccgccattgcggcgggcctcttttacagggagccgggcagctccgcgcccaggtacttccccagggcgtcgtaccagccctcccgggtgatcgggcccccggcgagcgcctcgaggtcggccagctgcacctcgccccggcccgtggacccgtcccgccacctggtcagggtgtagaccctgccgagcagcacctggtagaacagctccggcgccgcgtcggggtcctcgggcacccccggggcgaagtccatcttcccctcccactccgggcccgcctcgaactcgtccgccatgtcaaacctccgtcactgtgatgatgtacttgccgttctgctgcaccacgtcgtccacccggaaccgggtgccgggcatgaacagcacctcgcgctcggtcttgtagtacgagtactgggagacgttcacgccggtcttgccgttgatcctcatgtacacgttgccgctgaacgccgcctgctcgccgtaggacgacgagacgaaggcggagtcctcgaccacggcgcccttgcggtacgtggacagcatggccttcagctgcgagtcgttgaacgtcatgccgcgggagctgacgccctggaacttcggcatcttggacatgccgtgctgggctgcgtccacgtaggcctgcaggtgcgggtccgacgagtacttgcccgcccggagcgcgttgttcagcgcccggtaggtgtttccagtataggcctttaccgctgcgacttcctccgccgttagctcctggagtcccatcgatcgctgcttggcattgaccgccgccaggtcgccggtcggcagcccgttggcgaacttgcgcacgcccgctgcgcgctgggcccccgagtacctcggaggcggcgggaggccgtcgcgcggggtggaggccggccgggaggccgtcatgtccaccgcggtcggggtcacgccctgcttcttggcgacggtcgcctcgttgaaggagacggtggccgtgccctgcttcttgagctcgtactccgcggcctccttcagcttcaccttcatggttgcggagggctcgtagcccgccatcttcttgaccagcttgttggtgttgatcgggcccaggccctgctgctttgccttcttgtacgcctccagggcggccttaccattggcgggcagctgggctgtgaacttctcgatcttgccgttggagacgaagccggtcggcttggtgaaggcggcgttcaggtagggcttgcccgcggccttggccgaggccagctggtactgtgccagctccagtaggtcgtcggcaccgggctgcttgatgaccccgaagaccgacttcatggcctcgtaggcgtcctgcggaccaccgcccgcagccagtacggacttcaccttgtccagggcgagggaggacgtgccgccgagcttctggtccgccagcttgggcttctgcacggggcccgacaccgcctccttgaccgtcgccttctcggagagcgagaccgcgtggttgtaggagttagggctggacttcttccagttggacttccaggtcgcgatgttggtgaccttgacgtccgccgcattggcggggaactgcttcgccagggtctccgccaggtcctggttggacagcatgcccttctgcatcagcttgatggcctcgtccttcagctgcgccgaggtgagggtcagggcagactgggtcgccgccgcctcgggcgccacgacagccgcggcgccggacgagggcacgggcacgacgtccgggatgggcttggccgccacgaccgggccggaggccttgttgggcagcaggccgtccttcttcagctgggacttgtacgaggcgatggacgcctgcttggtctgcgcctccgggaactcggcgaggacggccttcaggacctggtcgtccggcatgccctgctgcagcagcgccttggccagcgacccgaccgaggtgtgcttgcccgcgacctcgtacggcagggcggggccgcccgggagcgggaccttggcgccggccggtggcacggggaacttcttcgccatcgcgtcctttgccgcctggatcgcgggaccgaaggccttgttgaactcgatggcggagaggccctgggacgtcacggcgctcgggctcagggcctggccgtagacctcagccacgagctcgtcggcgctcgtcaggtagtacgagtagagcttccgggcgtccggggacaggcccttcgccgaggccttcagggccgccagaacgtccgggtcgagcagcaggtcgtgctgcttgtggagcaggtggccgagctcgtgggccgcgacctgcttggcctgcgcggcgggcaggacggacagcttcttcccgctcaggaccacgcccttgccggcctggtagtacccgtacgcgccgggcgacccgtccaggtcgtcgacgacggtggaccactggccgccgacggcgtgcttcaggttcggcgggagggaggcgtccaggtcggcgacgacgtcggccaccgccttggcctgcttgagggcgccggcgggcaccttggacgcgggccccaggttcagcgcgccggccttgttcagctcggacttgtaggaggcgatggacgccgccgaggtggacgcgtccgggaactccttcttgatctggtccagcacctcggagggcgacatgccctgctgcagcagcgacttggccttcaggcccacgccgggctggatgacgttcagcttgtcgccctccagctcggccttcagctccgccagggagtagggcttgcccttctcgtcgacgaacttctccagcggcaggccgtcccggaagagctgcgccttgcccttgcccaggacctcgtcctggaactccttggactggcccttcagccacgactggtagttcgtcgaggtgggggtctgcccgatgttctcgtcggcccacttgtcgcggcgggccttgatggcggcgttgcgctcggccgcggacatgcccttccacttgtcgccggcggcctccttggcctccgcccggaagtcgatctcacgctggcggcgggtgcgggtgtcggttaccgtgggccggtcgcccacgatctcctccccgtgcagcacgggggcaacggtcgagcggcagttcgggtgggcgggcgggcgagggcccttgtcgatcgggtagacctcgccgtcccggctctgacagacgggggaggtgcggccgtccagggtggcgacccaccggacgcccttgatgacgtcggcgttggcatcccaggtcgcctggcgcgcggcggtggagacgtggttggtcgccgtgcgggcgatcatctccgcctcccggcgggtggtctccagcacgccgtccttgtagccgccggccttggtgcccctgatgcggcgcaccatctggtcgatggtctcgccctgcaggacgcccagccggatctgctgctcgatgcgggcgacgtcgttggtcgccatcttcccgagccacccctgcagcgggatgccattgatgggagagcccgcgacggccttgacgaccgtggcgggcactgcattgaaggagagggcgatcggcgtcgccccctggagcatggagacctcccactcggcctcggtcttggagaggccctccatgtcctcctcgagctccacctggatgcgctcggcgaccgcggcgcgcatccggcgcacctcggtcaggaggcccctgatgcgggcctccgaggtgtcggtgaggcccgactgtagcagggcgaccagctcggcgtcgctctgggccagcagctcggcggacttctgcgcctccccctgggagaagcgcagcagcctgatctggtggcgtacggtcgcgtcgaggatctcctcgttagcggtcttgggcatcactcgtcatccggggtgggcgggtcgacctgggccgggtcctggttgccgggcggctggttgcccgggggctgctggcccggtaggcccgtgccgttgccgccgccgaacatgtcgcccatcgtgttcttggcctcctcctcgaggaactcggcgtcctgctcctcgtcgaagtcgtccgccaggatgccgcgcttctggagctcgcccaggtaggtcttgcgggagatgtcccgctgcgcgcgggccttgttcagggtgtccagctcggcggcgtccgcctcgccgaggtccacgtcggagtcgacctgcaccgagccgccgtcgtccttgccaagccagttggccgtgtacttcatggccagctcgacgcagtcctggaagtcgtgcacggtggacgccaggtaggacgagctctcggccgagtccagggcgcgcccggtcgccgtctcgtcccccggctgcttgcgcatgtactcggccccgtaggtggccatctggtcctccagggcctccaggtcggtctggcccgccgcgatggccgcccccgtgtgctcgacgtagtaccacttgccctgcacgtcctcggtggtgaggaagttgttggggccgatggtgaccttctgctcggcgggcacgcccgcggccgccaggatggggaagcgcgacacggtgaggacgttgcgctggtcgctcttggattgccagtgctcgacgttcaggtgggccaggtcgatcagcgggggcttggcgtccatcagcccgacgcgcttgcctgcgtagaacgtcacgagggggatgaagtccagggtcgtggtgccctcgctctcgatggcccactcgtccttcttctcgtcgaccagcttccatacctgccagatgccgggctccaggacgcggacccgctcgatctcgacctcctcccagccgacccgctcgacggtggtctccttgatgcggacgtgggtcagcacctccttgccgttgaccatcatggcgtaggcggcgatgaggcactcgggcttgatgtgcacccagtacgggcgcatgccctcggccctgtcatcggccagggtccgggcgaccgccacgccggcagcgtcgaccttctcctcgggggtggggtggtccaccaggacgtgggagaagcccttggcccagccctcgcggaaccaggcccggcagaacgactgcaggttggtgccctgcatgtcgatgtcctcggacagctcctcgaagtcggcgtcgacgtcctcgcccaggacgatctgctcccggaacggcttgccggccagggtgtccagggtctgctccgtcatgttgagcaggacggcccgctcgaggcgggactcgtagttcgcgttggtctcgttgtcgtactggggaaggtactccttcccggcagcgcgcatcgtggtcgtgccgcccaggagggcgtcgatcatcttccacaggggctgcatgcgcaggtaggccccggacggcgtggcgaccgtgggcttcttcttgggtccgtcggccatcgcgggctccttgggctagttgtgagctgatgctcgcgatggtagcccgggaggctgctggttgtgagccagcagcctccgcccgtcacatgtcggccgagctcctgaagcccaggaacacagggaagcgcggcgcgtccttgctgccgcccgggaagaacttgtacttcacgaggcggccgacgagcccgtcgtgccggcggctccacaggtcctggcgctggtcggcggtgaagcccgtgccgatggagaactcaacgcccttgaacggcccattgacggcccgcacgacgagggcgcccatggtgcccatgcccaggaggttctccttgctgtggccgcgctccgtcaggccgagggcactcgtgctggcctcgttggcgttgtgcatcagctcctccatgcggagcagctcggcctcgccgtcctcgaagcgcttcagcttcagcaggtcctgcgccctcagggtgccgcggccgaacttgtagggcgagcaggcgtccctggccatgaggccctcgtacccctcgccaagcacggacgtctcgaccgacaccagctcctccggggtgttgacctcccagtgcggcacgatgacgcacggccggccgagcgccatcacgcgccggccggcctcgtcgtggcgcttgttgaagcccatctcggggtgcgtcacgtcgtcgaagacgtggaagcggaagtcaggctccccggcgatcgacatgaccccgcgggtcgtgttgttgaaggccatcctgtccgccgggtcgccgacgatcagctccccgtccaggccgttgtacatcggctggccgagcacggcctgcacgtggcggttggggatgggcttgaggctgcggctcaccgcgacggagtcccgcacgatgcagcggatgccgtccagcttcggggaggtctgcagcgggaagcgcagcttgaggacgtcgtcgatggacgccgccagcatgggtcggaagctcatcagaagtcccccggcgcgacctggaagcagggcacgccctcggcccgccacatgtccaccaccgacttccggtcgtcgaacacggccacgagcctggcacggtcgtccgggtgcagctgggagagccacaggcgcttgagcttcacgtccggctggtgatcgtgggcgaaccgcatccgcagggccatgcccatgaacgggtcgtgctcccgcagccacggcaggtgcttcagcagccaggcggaggtcttgtccgacacctcgtcggagcggccggaccacacccacacgtcggcgcccgccaggtgcagggcgttggcggtcctgatgaccgcctggcacggggtgtcgcggtcgcaggcggcgtagaactcccgccactgcttggggtcggactcgacgaggtgccggcggtggtcgatggtcgccagtgtgccgtccaggtcgaagatgtagaggggcttactgttcacgggcttgctccagggcttcctcgcccgcttgggtcaggtacattccgacgccgaggcgccggtcgatcacgtcgagggccacgttgacctcggagccgctggcatcgccttcggctaccatgcgggtcagctcggagcgcagctcctccagctcgcggatgccggtctcgtccgccctgcagtacaggcggatgccctcgcggatgccgcggtcgaactcgagcgcgccctcgggctcctcgaaggcggaggcgctccgctcccacagccggtcggccgcctcctcggcgtcctccgccaggtgcagctccgccagcgcgtactcgatgccggcgcggtacatgttgccgggccgccggatcgaccgtgccagccaggcgagcgagatggcgaacagcacgatcgccagggtgagccagaagttgggtggtgagaagtccatcggtgttctccttgggtaatagagaggggaggagcctatcatggcccctccccagtcaaccgcgtaccatcagtccatgcggtccaggacgtacctcgccacgccgccctcggtgcggaccagcacctccagcggggtcttgtcgtccagcctcaggccggaggcgtgctggacgccgcgcggcaggcgctccaggcgtgccgagcgggagtgggcctccagggtggcgcgcacctcgtgcagctccgagcgcaggcactcggggaacagggcgagcgaggcctggcgctggtcggccgcgccctcgatcatgagcaccaccgagttgccgtggtgggcgaacccgccgccccactgggagggctgcttcgtgatcccgaccaccttggcgcggcccgggcggaggccccagttggacgccggcgagccctggtggtagacgtaccaggcgaacgggttgcggcactccacggagtcccactgcaggatcggcggcgcgtcggggtggacggcagtcgtgatcgcgcagaagttgccctggtggggcaccacgacctcgatctccagggcgcgcggcaggacgtccctagcgaacctggcgtaggtcacccgctcggcgcgggtgttgagcagcgcccgctcggtggacagccgctcgtgctgcagcaggtggccgaacaccccgcccgcctggttcttcttgggcggctgcggctgccactcgaacacgacctcgtcggcccgagcggggcgccgctcgagcgaccgggcgagccccatgcgctcaaacaggcgctcggcctgcgccacgttgccggcggtcggcgccgcctgggcgcgctggtaggtcagcgggtccgcgcgcttgttgtggttgcggcggatggactcgacggaggcgccggagcggatgtcgtcgatcagggcgccgagcagcgaggagcgcggggtgcaccaccccttgccggccatggcgacgcggaaccacaggcggcggttgacggcctcgccggagaggtgggccatggccctcttcgcctcgatcaggaactccgccatcttgaccgtcttgtcggcctggttgaggccgcccgtcatcagcatgtcccgggcgcgctccaggtcgcccagggtgaactcccggagggcgaagtgcaggtgcttccggttctcgcgctgctcggccgccacctgggaggcgtccttggagccggaggtgtgggagtgcacgccggggttggtccacaggtgggaccagccgccctgctcgcggactccccagtcggcccggccgccctgctcgcggactccccagtcggcccggccgtcccagaagaactggtccaccacgtggccgcgctcgacggcctcgcgcagggccttgacgaccttgcggtaggggtgacgggagcccagcagggtctcatcccacaggaccgacttggtccggccgtccgaggtcagggtgaccaggctgccgtagcggtgcacgaacgagcggcagcagttgcagtcgtggtactggcggtccagcgggtcgaactgctccaggtagaggtcgaacaggtcgcgcccgacgttcacccggaaggcgttcggcacgacgttcagctgggccttctcgagggccgcgtgcatcgcctgggggcacgtcgtcgaagcgcttggcgaaggtaggtacgcgggcgtggcccatctcgtagggccggtcgcgccgggcctcggacccggtggtctgctgcatgtggttcactggtatctcctgaccgggtgccgccaggcccggatagtaaaagaggggcgacggtcacagtgtaccgccgcccctcctctggagatgccgctgttcctagtttggggcgctggtcagccgaaggcgtcgtcccagctgcccgtcacggcgcccttggagtagtccgtcgccctgttctcgaagaagttggtgtgctccttcccgaagacgatggcgtcgacccagcccagggggttcttgctgacgccgaacagggcgcgctcgccgagctgggcaaggcgctggtccgcggtgtagcggatgtactgcttgacgtcctcggcggagaggccctggttctcgccggactcgtaggccaggtcgatgaaggcgaactccagctccaccatcttctgggcgatctccctgatgcgctcggagtgctctgccgtgcggaggtggggatgctcggccagcagctggtggtacaccttcatcatgaactcgacgtgcagggtctcgtcccggatggaccagctcaccacctggcccatgcccgtcatcttgccgaaccgggtgaagttgagcagcatgatgaagctggagaagagctgcagcccctccccgaaggccgagaagaccgcgatgtccagcgccaggccctccaggccgtcccggcgctggaacaggtactcgtgcttgtccagcatctccttgtagcccatgaaggcggagtactccacctcagggatgcccagctcgtcgatcagggtggagtaggcctggatgtgcacgccctcgcgggcggcgatcgaggccatcgccatgcggatctcggtgggcttgaacgtcggcaggtaccggtcgatgtagccggaggccacgtccacgtccgcctgggtgaagaagcggaagatgtgggtcagcaggtggcgctcccggtcggtcaggtcggcgcgccaggtcttgacgtcctgcgtcatgggcacctcgcgcaccagccagtgcatctgctccgaggccacgaaggcctcgtacgcccaggggtaccagaagggcttgtactccgctctcttcgagaagagggacggactgttgtcgatcatcatgggttgttcctcagccttcacacgcggtgcactcaccgttgaggttgcatgctgcgccgctcacctcgggcaggtcaaccgtctcttcggcctggggcgccggggcgggctcgcgcaggatctccggcatcacgccgaccgaggtggccttgacggagctggagcgcaggtagtagagggacttcaggcccagcttccaggcgcgcatgtggacctggtgcatggtcctcgtgtcgacgtccgccggcaggaagatgttgaggctctgggcctggcagatgaagggctgacgctgcgcggccagctcgaccaggacgcccgggtcgagctccgaggcggtcacgaacagagccttgtccgaggccgacaggaacggcaggtgctgcaccgatccgcgctcgaggaagacgctgcgccagacgtcgtcggtgtcgtggccgagcgcggcgaggcggcgctgcagcgcggggttcttcatgatccccgtgccagccatcgtcttctgggagaaggcgttggcgaccatcggctcggtgctcgggctgacgccgccgcagatgatggagctggtggcgttcggcgcgatcgccaggaggtgggcgttgcgcatccccgtgccgaccaggtcctcgggctccccgcgctcggcggccaggcgcatggaggcggccacggcgtgggccttcagctcggagtacagcacgacgttgaaggtcgcggcctcgtgggagtccagcgcccagccctggtcctggcagtaggtgtggaagccgagggtgccgaggccgatggagcgctcgccgaacacggaggcgaccgcgcgccacatgccgtggggcgcctgctccaggaagacctccagggcattgtccagcatggtgaccaggtcgccgatgaactgctcccgcacgtcccaccactcgtcgcgcttcgccacgttggtcgaggacaggcagcagacggccgtgcggtccggcgtggtcggcagggtgatctcggtgcacaggttcgagtggttgacccggaggcccttggcccgcagggaggggtgcaggtcgcggttggcggcgtcgatgaagaacaggtagggctcgccgaggcgggcgcgctgctggagcatctggatccacaggctgcgggcctggatcgtgtcggtcacccggccggagtgcgggtcgaccagctgccaggggccgttgtcctccaccgcccgcatgaaggcgtcggtgacgttcacgccgtggtggaggttctcgttcttgcggtgcacgtcgccgccggtgggcgatcgcatgttgatgaactcgacgatctcggggtgggagacgtccaggtagaccgcgtgggcacctcgcctggtgcgcccctggtggtaggctatggcctgcgagtcctggacgtgcatgaaggccatcgccccgggggtgtccacgcccttggcggtcacctcgccgatcgagcggacgcggctccagttggtgccgatgccgccgccgttggtcgagagcagggcgttctcgccgaagttggcgaccaggccctcgatggagtcgtcgacgtcgttcaggaagcagctgatgggcaggccgcggttggtgccgccgttggagagcagcggggtggcgaacatgaaccactgcttgctggcgtagtcgtacaggcgctgggccagggcgtcgtcgccgccgctgaaggccttggccgcgcgggcgaaggcctgctggaaggtctcgccggggaggcagtactgcttggacagggtggcggtgccgaactcggtgagcagggcgtcgcgcgcggggtcgaggacaatccccgtcttagggtcgatcatggattcactccggtggttgggccttggcccgggcgtcgggccgagcgcgcatcgtgacgcgcgcacgctcgtagcgcgagccggcgaaaaagaaagccccgacccttgtgggatcggggctctcagcccttccaactcaaccgatggaatcaccatgaccgggctgtccagacccggtaggcgcatgatgccgcgggaggcgtcggccgcgggccgtcgttcagtcccagtgggccgagagcatctcgatctccccgccgcggcgcctgaactcggccacggtctcggcgcgctcctccctgggctgctcgggctgaggggccgcctcgtccgccagcctggagagcctctgccggcgcagctcctggctcttgcgctggaagtagagcctgtcgtactcccgcttggcctcgcggtcccggccgcccaccttcctggacgtgtccacggagccctctatgagcctgtacagcttccggtgcccctggggcctgcaggacgcctcccccgccctgcgcatcttgcccaggacgtccgtgaccgcgtcacggtcgaggcccgcctgcgaggcgatgtgggagatggagtgctcgcccgggttggcctcgagccaggcccggacgcccttgcggacggaggagtaggcggtcacggccgcgtgaacccgggctcgagcatggcgcgcagctgggcgcagctcagcacagagcgatcgatgccgccccggccgtcgggggccatcacgttcaccatcagcggaccccagctcgggctctccgcggtgctgatgtagtggggcacgctgaccaccatgtgggacactcccagcaggtcgaacacggtgcccatgggggtgttggcctcgagccacgcccggtcggcgcgctccctggccaccgcccgcaggaagctctcctgcttctcggccagcatgctcaggccgccgcggctgcgacgtgcctggttgcgctcgtccaccagcttggtggcctcctcctcggagatgggcaggatctggtagggcacgatggcgcccgggtcgaaggtcttcatggtcggactccttggtagggagctcagtttaccgggcccagccatggccgaacgccatcgaactccacaaaaggcgaagcccccgatcggcgggggcttcgagggtgctggcaggggtcggaggcgcttatagcccgccaggctggacgacagtttgctccactcccccatggtggagtggtcccgccgatcctgtcctgccagtctgcaccggggagctccctagggctcctgcaggctctgcgaccgttacccggggagtgggtcgtcgtcggcgggcctgctcaggcgtgcactcctgtgaacatcataagggagctcgccggtacagactgttgggtgggtcctgggcaggttgcgggcctgcttctcctcctggcggcttcaaacctaaccgggaggtgtcctaatccacattagacgacctggaccatggtgtccccgccctcgggtggacctccgggcggggacgtgacgggaggttgatcctgctgcgtggacctttcggatggtcagcccctggaccgctagatcgtgggcgtcgcctcttactcggtgccagcctagcgctgtctcgtcggtcagcgtgtcggaggatggggtaatgatgccgggccgtccgtggcccgcacaccgtcgttcagaagctgccctgccggacggccttccgcttgtgcatgatgcggtagcgggagtcgtcgccggcgtggtcctcgacgtcggtgtcgacgtcgtccgggtccttctcgtcccgcggcatgggcggcacggtgcgcacgaagtcggggcagcgctcgcccaccacgaacacgccgggcgcctcgcgcacggtgggcctgggctcgtccatctcgtccaggttgagggagttcttcagcctcttacggaactgctcccagccctgcttgcgcgcgttgtccgcccgctcccacctgatgcccttggcccgcatgtcgcgctcgatgcagttgccgttctcctcggaccagatggcggggtccgcggggcccggcttgacccggccggcgaggcccatgcccacctccctcaggcggatgccctcggcgatgtccgcggccagcatcttgaggccctcgttctccgtgcccttcttgaggccgtaccactcgccgatgcggaacaggtcgcccctgaccgtgcgcatcctgcgcccgtccgggaacaccaggtccgtgccgtctgactccgcccaccagccgaccgagaagggcttgctgctgccccagtcgaaggacctgtccaccgtccaggtgcgcggtacctggaagggccgcacgacgtgggtctgcgtccgccacaggtcgtcgaacatgccgccggaggtgatgtcccagctgccgtcgagccaggccgcgatctggccggggttcgaggccgccgcccggatgcggttgatgtactcggggtccgcgtccagcaggatgcggttctcgctgatgtggccgtggatggcgatgcggtcgggctcgcccggggtggtgatgatcttgccccgcatgccgggcagcctgaaccgcagcttgacccagttgtgccccttgccgtacgggttggtcgtggcgcgcaccttgcggggcatgcccggcaccgtcgagcggcagcaggagaacatcttgaggtacatctcggaggtggcccagttggtgagctcctcccagccgatccacgggtaggcgtggccgtggtagttgtcgtagtcgtcgaccttcgccatgtggcgcagcaggagctgctcgccgtcggggaaggtccacacgtagtcgctctcgttgaacttggcgcccgggaaccagagcttgaaccaggccttgctcttggcgaccacgtcggagagctgcttgtacgtggcgcggaacaggacgccgcgccaggcggcgccgtagccctggcccacgtgctggcagaagtccgccaggagggcgtcggtcttgcccgggccgcgggtgccctcgaacaggcactcgaagaccgggcaggtcaggaagaggacctggctgccggcctgggggatccaggccttggtccgtgggccctcctgggcggcctgctgcggggtcttcttgcggcgccagtggggtggctggtatgccatcagtcctcctcgtcggccgggaaggccctgtcggggtgcaggaccaggcagtagcaggccgccaggacggtccccagggcccgccaggcgttccgtgcgacccaccaggcgcacttgaggcgcttgcccaggggctccctggcctcggtcctccagaagcgcctggcgcgggtcatcatgtagcccccgcgcaggaggtgggccgcgaagaccggctcggcctcccagttctggtcgcccaggatggacgcgccctgcgaggacatgcccaggagggtgtccgccaggtcgtgggcctggcgcccggtctcggagggggctcgccaggtgcccctgacctgggtcgccaggatctcgccccggtcgtcgagccaggcctccaggtagacgtcggggtcgcgggagtagacgtcccgctccatgcggcgcttggaaatgttggtgacctcggccacggttcacgctcccaggatgcggtctatgacggtgttggcggacatgagctgcttgagccagcgcttgtggtcgtccctcatgcccggggtcatggtcttgtacttggcgaggcggctcagctgggactcggcctcgcggcgccgggcccatgcgacccgcacctcgcgcagctggtccgccaggagggcatcggtctgctccttggtcggggtctcgctcatggcaggtgcccccaggtcgcgacctcgcgggctgccgcttccatctggtcggcctccacgctgaagtcgtggtacgtgtaggccatggactctccctgggcggcgcgctgctggttctcggcctgcatgcccaggaccctggcatgggccgccagtatgttgcccagctgctggacgcatgtggcgttcatcggcgctccatcctggtggcgcactcgatggtcaggccgtagcccagggccagcctgcgcgggtcgacctcgttgccgcacccgcaggcgcagtccccgtcctcccgtggtgcccatcgcttctggcgcgcctgggaggcccgtcgggccgcgtctatggaggcctcgtcgtgcgccagggactcggctgaggcgcggtcgatagggtcggggaagtggtctgcgggctggatgtccatggtggtctctcggggtgtggaaagggcgcccatcagggcgcccggcttgtgctgctctgcgattatcccgcgggcgggggtgcgtcaccgccctcgttgttcccggcgtacttggcctgctgccgctgcacctcctgtgcccaggtgtccttgtcgatggcggccgggatgaccaggacgccgccggccgcgccggtgtgctcgaccttgtggttctcgcggtacttgtcggggcgggcgcccttcagcagggtctgcatcagggcgtcgctgtacttcctgacgaccagctgcttctcctcgccggtgaccttgtcgatgaccgtggtcgtcatgccctggtagatgaccggctcgtcgtacccgtcgaccgcgcggcggaacgcctcggcctcgatgcggtcggccgcctcctcgcgggcgatctcgaacatcgtgttgaaccactcggaggtctccctccagtgctccacggcgccgcgggacacgccggccgcgcggcagccgtccaggacgatgccgcggagcgcgaacgcccgcaggaagaggcggcgccgctcggcggacatgcgctcctgggtgttgaggccctcgagctcccactcgacgagctcgagctccgagaccgggccccgctcgctgaggaagaggcgctcgtcctcggtcatgttcttgacgctcactaggcgctccgtgtgctgtgctggtgcaatggtccgatggtaccgccgcccaggccgggcagtaagccagcggtctcccggggccgacccgccggttcctcgtgcacgaggctccggggaccgcgcctggacgatccggacgcggagcttttgaggggcccgccgtctcggccaccgcccgggctcggccacgaccggaccgatcgcggggaattgccccgcaggtttgccggccgtgttgcccagggcggaccgtgtcggccgtgtccaccaaaaggcctagattagtggatttagcaggaagatctgttttaaaggcttatacaatctaaacctttattaaaaagatctagataagataaaactatgattctgatgcagatttcggcaactgtctgaggttctggaccgtctaggcatctcggtggtggtgccgtcatggtctcggtgtcgtttttcctggtacaacaccgagccaaagcctcgtacggtccgtctgcctcagattccggagctaagtccttgatccgtaagcctcagacggctcgtacggccgtctgagcctggctttccgggggctcagaaggctcgtactcccgccgaccgtggccgagcggggcccccggttcagtcgagggcgtccttgggccaggcgatcttgctgcccagcttggcctccatcatggcgcggcagtcctccaggctggggagcttcgacgcggaggcgcggcccatgcggtccaccttgaccgcgtagtcgtcgtccgccggcttgacctgcgtgttctcgagcctgccgcccaccagcttgttgagccgcatgccgaaggccaccgggtcggcggggcggtacaccctctggtccttggcgaactccgcgtagtccgaccggaggtgctccttgatgatggtgaccgcgccctcgtgccagtcgctgcgggcgttcgggaggatgccgtcgaggagcttgttgtaccaccaccgctcgacgtcgtccatggtcatcaccttctggtccacgagggccgacgtggccggcacgtcgtcccgcggtgcccagccgtcgatgtcccgcatcagcaggtcgtacagcatggcctggatgccgccgtccctgtacatctgcctgttgaggcggctgaagaactccttgtccccgcggcggttgttgctcacctggaagaccgcgaagcggcgctcgccgtcgaggcccgccggcacgacccagtcgccgttggcggccatgaggatgtggatcatgttcttgcccgtcacggcgtcgcggcccttgccctcgtaggcgatggtcggctcggtgaccagctgcttcagcttggcctcgcccgacttgtcgccggcccagaaggcctcgtcggcgaacaggcagatgcagttctgcaggtgcgagttgaaccggcccaccaggtgctcgggcgaggagatctggaggccgtgcgatcccgccaggaacgaggcggcgcggcccagtgtgcccttgccggtgcccttctcgcccttgaagcagagcgccacctcggcggcctgcgacgggtgctggaccatgtaggcgagccagttcatcacgtactcgtaggaggtcctgtcgccgtcgcacagggtctccaggaccagctgctgcagcagggaccagtcccccttcttgggctgcacggcccagccgcgccacaggttcagccagccctcgtgcgtctgctcggggtcgaagatgatgcccttgtactgccggcggtgcggcgacctgatccacagcgaggacttggtcaccagcttgtcgtgcatctccacgagctggttgcagtagaggttctcgaagtcctccttggtggagcgctggaagaacggccgcttgaggacggggtccagctcctccgtgaagatgcggaacttgccgccctccatcacgacgcagtgggtctcgttcatctcctcgagcacgcccgccaggccctcgagcttcggctcggcgcgcagcacctcgtcgtcgacgccctggccgagctcgtcggggtcctcccacgtgtcgaagtcgtcggccgcgtcgacgcgggtcacctcgccgcccacctcctggaccaccttgtggaggaacttgatggtgaccggccggccgccgcggcccgagagggcgtgcagcgagtcccaccggcggccgatgatccaggcgtcgtcctggtactcggggtcctgcgtggaccact

SEQ ID NO: 11 - DNA, 200277 bp, unidentified
  misc_feature 1..200277: note = the genomic sequence of a bacteriophage
  source 1..200277: mol_type = unassigned DNA
ctcgacgtagtttctgtctcgagattccggtgagatagaaagattgttctttcgtaccacatctgtagactagtggtatgaagatcaagaccctcctcgcagccgcactgatgaccgtcgcactttctgggtgcggcgagatcatagaagaatcagaaatcattcctggcgcagaagctgagatggtagcgatgtgcaatgtgaatggaggctttgttcgcggatgggttacaccgatgaacaaatactcagcaggcaaggtttcgatcctcgaacagtacaggacagcctaccacgttgaatgtgtcaatggtgcgaagattgacaagctgttcgaaggcaagacaatcagataatatcaacccaagactaggagttagtcatggagtcagcaatttacaaggacctcgaccctgaggtggcagcagagtgcggctacttcgaaccgaaggaacccttcaatcaaatcttctcgcagccttgggcgcgagctgcgatcagcgcatacgaccagatcatctactacccgggcagtttcggaacgttccatgatggtcacgtctcagtgatcaagcgtgctctgcgaaagtaccccggcgcctggctcgtgatcgcaccgagcaattcagactacgcttcccagaagtacggcgcatggtcggaactcgcatcgaataagcatcgctacgacaccatcaagaaggtgttggataagcatggcatcactgcctcgatcgacattgatccgatgctcaacaaccgctgtgatcagaacttcactgaccagctggatgccttcctggctgcgggtaagcgcgccggcatctccgacatggccaagcctccggtcatcctgtgtggcaaggatcgtgcggacttccagaacctcaacaactacaccgacaaggttatcgtcgagtggtttgaggataccactgggctgagcacttccaagctcgagaacaagaagcggatgaagaagcatctcatcctgcgctgcgtgaacgaggaagagttcaatctgttctgcgagtatttcgaagaccagtacctcaccatccagccgtattacctgcacgatgaaatcgagtctgccaagaaggcagctgtgatgattggggcgacccacaccaactgcaaggaatacgctggcttcttgccttacatcaagatcagcaggcatttcaagaacccgctcgagaacggaaccgtgaacaattggttccttccgaatgacgcggttctgcttgactcggacatctttaccggaaccacgcaggcttgggtagagtctatgggcggaaagctccatggactgatcaatctcaaggactggcacggtgtctgggagctcctggatatcagcgacttccgaaagaaagaatgggcgtatccctttacggatatctccagccgctgtagcatgcaggcattcgatactgcctaccacgaccacttcaacgaattcaaggaaaagctcagccatgtccatccgtgaaatcatctcgccgaacgttaaggccatccttgctcttggcatcgaacgcgatacgccttttgagcttgatgctctcctgcacaagaatggtgtcatcgaaatcaacacgtcgctcgaccttctccccgaagtggatcgcgcgttcgagattttcgaccagcttggtgctgtgtatccggtctcggtgaccggcctggaaaacgtggaaagcggcgttggttcgcatcgcttctgcgcgtgggatggcgaattcgcggcgctcctgaccgaggtggtcaagctgatggagactcctgaactgatccagattggtgatcatctctgggagtttgagagcgtctcgaagtatttccgtttcatgcggtacgatcagggcggtgaacatttcccgcactacgacagcgatttcgttgtctacgatcatctgaaaaccttcggacagtcggttcgctacgccacgaagtattcgctggtgatgtacttcaacgactgcgagtcgggagaaatcgctttcatcgacaatgatccgaacccgacaaagggtgattggaatcgtcaggcgactgatgctgagatctccttgcgcatcaagccggcaaagggaaagatcgttctcttcccgcacactctctgccacactgtgctccccttcaccgataaggacagccagcgcttcatcgtgcgcggcgacctgatcttcacccaggcataagacatgactctcgtcccggtaaaccagaacgaactggaaatgtcggttcggatgttcaagcacatgttccgaaggaaggatccgtatcagaagattctcaccctgaagaactacttcttgaactggaacatcaagaaggttgtagtgggcgtctcgggcggcgttgattcggcactagttctcttcctcctggctcatatcccggacgtcgaagtccatgcagtgacgatcgatttcgacacctacagcgatgtctttgaccagggctatatcgagctcttgcagctggctacgacgcgcttccgaaacgtgaagtggcacaagaaagatctgactctggctttcagcgagatgatggttgccctggacctcgagaaaagttctgatgaagtcttcgccaacaccagctatgcgatgcgttacctgagcttcttcgccttcgcgcaagcactcggtggcgtgaccatcggaaccaccaacctggatgagatgggctacgtgggctggttcgggaagaactcggatatgatggtcgacatccagccgatttcgaccctgcacaagttcgaagtaatcgagtgggcaaggctgttgggcgtacctgagcgtgtcgctgcccgcattccgacaggtgacttggtcaacggtaccagtgatgaagaaaacttcggctgcacctatgacgaactttctttctacacgcaccaccgtctcaaagacccggacatggaagtttcgcccttcatggaagcgcatttcgaaggcgtagaaaggttgcgaaagaaaaatctgcacaaataccagggccagaagttcaacccagtcttcctgtaaagaaagatttctcctgtattatttgtagaacataaaccgaactgaggttcagatggaaatcgcgctctggctctgcttgatcccgatcacgtgggcggcaatagcacatttcgcattcaaaaggacgatcacctggaaagaaggtctgctccagggtggtggtatcgccctcgtagttctcctgatctacggttgcatggcatacagcaataccgccgatcacgaaatcctcaacggacaggtgacgggaaagaagcagacctggaccagctgttcgcactcgtattcgtgtaactgctacacgacttgcagtggcacaggttcaagtcgatcctgcacccgacattgcagcacatgctacgagcactccaacgactgggattgggacgtcttcacgacggtaggtaacatcgagatcgatcgtgttgaccgtcgtggtagccgtgaaccacctcgttggactgcggtacagatcggtgaacatgctgcggtgacgcacacctacaccaactatgtcaaggcagctccgagcagcttgttcaacgtcaagctggcggaaaccgaggcaaagtccaaggctgcgataatccctcagtacccacgcatctacgactactatcgcgttgaccacaccattgatatccaggcaggtgtcgcgaacagaaaagcctgggatgcagagctggacgaagtcctgaaaactatgggttcggcgcgacaagtgaacgtcgtgttggtcttcgtaggcaagcaaggtcgggagtacaaagacacgttggagcgtgcttggctcggcggcaagaagaatgatgtggtgattgtggcaggcgtcacaggaaccaagatcgactgggttgaagccttcacgtttggcaagtcctccggtaacggaatgctcgccgtcaagatgcgcgacgagttgcagaagtacggtaccactgaaaatgcgaaggaaggcgtggctgtaatcacaaaggtgatcgcatccgacttccatcgtaagaacatgaaagactacgaatacctgaaggctgagggtggaccatcggcaaagcaagtttcctggctggttggtattgtcctggtcctcttgatggtgacaactttccttcttcacaagtacgacgtgttcaacgaggagttctacgacaggcacccgaacattcgctacatccgaaatagttttcgtcgttaatccaaaatcacataaacccaacaaaggtaattgataatgaacattcgtggcaacaagggctcggcgtggattgcagtgctggtcttcctgggcatcctggcactgggcgcagtcttcgctgtaggcagctatgtcagcgcagccaactacggcaacgaagccgagcagcgcctggaagcgaagtggcaggacaatcagaacgtgctgggccagtacaccatcaagatcggtgaaatggcacaggtgccggaaatcgcgcgtgatgacctgaaggaagttctgaaggcaacgttcgaaggtcgctatggcagcgaaggcgtaagccgtggtgctggtgagcagaagaccttccagtggttgcaggaacagaatccgaatctgaacccggaactctacaaccgactccagcagacgatggaagctggtcgtaacgagttcaaggtctcccagacggaactgttggatgagaagcgcgcctatcagacgaacctgggctatgtctggaagggcttctggatgaagctggcaggctacccgaaggttgatctgtcgaagtacaaggttgtggtcggggctgacacggcacagaagttcgagaccggcgttgacactggcgtcaagctgcggtaataagtagaagtatccgacgaggcgctccggcgccttttcggttgatacgaaaccatacatcgttataatcagcaaaagaaaggagttttcttatgcagcatgatctcgcagttttcatcgggcgtttccagcctttccatctgggtcacctccacgctattgaggaaggcctcaagctcgccaagaaggttctcatcctgatcggtgacaccggtggtcctcgtggcctcaagaatccctggaccgcagaagagcggaagcagatgattctggattcgctaggcacctaccagcgcgaactcgtgatgtttgacattgcatacgacatgccgtccaacacggaatgggctggtcagattcagagcattgtcagcaacgcctcgaactggcataagctgcccagcgtaattctgatcggtcacgagaaggacgcgtcgagcttctatctcaagatgttcccgcagtggaagcacatcgacaccggcttcgaagaactggaaagcggacttctccgcaagtacaacgccaccgacattcgcaagatggtctggacgaacacgctgcattacgcaacgggtctcctgcatccgaccacgctgacctacctggtcaatcacatcaagcacaacccagctatctatgaagagtttctcgaggaatacggcgccatacaggcttatcgcaaggcgtgggcaggttcgccgttcccgccgatgttcgtcaccactgactgcgtggttatccagagtggccatattcttctgatcaagcgaggcgaccgacctggaaagggtctttgggcgttgcccggtggcttcctggatcagaccgagtccatccaggatggtgctctgcgtgaactgaaggaagagacgaacattcacctgcaggatgatgtgcttcgccgttgcattgttcgcactttcgtccatgatcgtgcaggcggtgtcagtgaagaagaccgtggcagaatcattacgcatgtgcatgtcgtcaagcttgccgacgggaagccactggccaaggtcaagggcggcgatgacgcagccgaagcacgctgggttccgttgggcgaaatcaactaccgtgagatcttctccgaccacggaaagatcattgaccgcgccctgagtggcgtctgaggaattatcatgaaggacattatcaacggctttttcgaagaagcagaacgtttgcaggctctggcagaagaacagcgcagcaaggctgctgcaatcctgacacctctgtttgatctccagcatcggcttgcatggtctgttcattgtgagcccgagttcaaagaactggaaaagtggtatcgcaagccgcgtgataagttcgcaaccaatgcgaaccgtcagcattcttactacactttcgacggaagtttctacgatctctgtgaatggagcgacggtgactcggctgactccattgagctgcatcctatcttcctgacagatgcttctgaggaagagaagaaggaagcaattcgtcaggtatatcgagcagatatcgctgccgtagaaaatcagaagcaacgcgcgaaagaagctgagctggaaaaggctcgcaagcttctcgctgaaaacggtgtgtctttctaaggcacactgttagactataatcacaccaaacgtagaaaggagttttctatgattttcaatccgatccttgcaacagacagctacaagttctcgcacttcatgcagtacccgaagggtaccactctcgtcaagagttatgtcacggcgcgtggcagcaagattcctggcgttaccgcagtggtttgtgctggtctgcaaatcttcattcacgaatatctcagcaagcgcgtgaccaagaatcacgtcgatcaggctgaggcattctgtgccaagcacggcgttcctttcaaccgcgaaggttgggacctgatcgtaaccgatcacaacggctaccttcctgtcgagattcgctcggttgaggaaggtacgcctgtgccgctcaacgagctgatgatttccgtgatcaacaccgacgagcgtttgccgtgggtgacctcgtatatcgagacgctcctgctgagctatgtctggtatgcctcgactgtggcaaccaagagccgcgaaatcaagaaggtcatcaagcagtacctggacctcacgtcggacaatgctgatgtggaacttccgttcaagctgcacgacttcggttaccgtggtgcaactcctggcgcagctcatgttggtgccttcgcgcacctgatcaacttcatgggtactgataccgtcgccggcatcgaagctgcaatggagtactacggttcggatgtctgtggttacagcatctcggcttcggagcattcgacgatgaccagttggggtcgcgatggtgagttcgatgcctaccgcaacatggttgactcctacgccaagcccggtgcgatcttcgcctgcgtgatcgacagctacgacaccttcgcagcaatcgatatgttctgtgaagaccgttgtgcaggtggctcgctcctggacatcgtcaagaaccgcggtgcaaccatcgtgctccgccctgatagcggtgacccgatccagatgccaattgacgtcatcaagtacctgatggaaaaggtcggctacgagatcaacaacaagggttacaaggtcctgccgagccatgttcgagtgattcagggcgatggcatcgatattgaagacgttgagcacatcctggagaccctggtcgaggatgaaaagatcagcgcctcgaacatcgcatttggcatgggtggcggactccttcagaaggtgaaccgtgatacgttcaagtttgctatgaaggcgtgcctggcatacatcaacggcgaaaaggtagacatcatcaaggatccggtcactgaccctggcaagaagtcgaaggcaggcgacctgagcgtctatcacaatccggaaactggagagtggaagaccatcactgaaggttcgctggattcgttcgctttcaacaagccttcgagcaattggtatcgcaaggactatgttgtctatagccactacggtcgcgatactttcttcgactatgtggacatggatactgttcgtaggaatgctgctctttaagggcagcttccttcataattactatggtgagatgaatgattctcaagagcgaaatcagaatgtccaaggctgaaattgaaagcctcatccttgatcacctgaaaaataacaacaagcacaatctcaagcttggtcgggtaagcttctctgttcgtgagtctgacgaccactatggtggctacactccagctgatcttgaaggtgcaactatttctgtggaactggagcttgacgatggaagagaggatcgaagataagattttggcttatctgcgtggcgaagttgactatgatgcacttcaactgctgcgtgatgcaagaaacgagatcgaaaaactgagagcacgtgctgttgatcttagctgggcagcggacgttgccaatgaccgtgcagatgctttcgatccgaggtacaactaatgtcactgaccaacctgttttcttcagggattgaataccggaagcgcgtcatggtgctggtcaccaagcgcatgctgaatccgaaacggggtggtggagtctctacgtttgtgcgaggcattgctaagtctatgcctgacgacacactcgtagagattcattgcgttggatcagataatcttgatgtctatgagattgatcatccgaatgtcgtgacttatggttatcctcagatggtgaagatcaaggcagaggagccaggcatcttccagcgcatcatgatcaacttcgatcagatcgaagaattccgccacgccttgaacaagtcggtgttcacggaagagaagctctatgatgcgattgtgactacctgtcctgagtctgcattggcttgcatttccttcggagcgatgatcgaaccattcaatgtcatctataccacgcatcacggcttgatgtctgacagcctgagcaaggttcctttcgatgacgctgtgatctacttcgccaacgaagtgattccgaagtctggatttgtcaccaccgtgactcagactcctctgaatgctgagtggctgcaggaaaagcatggtgtcaaggttgatcacgtgattcctctgctacctgacgagcttcctccttttgctgatatggcaggtaaggaaggcgcactgttcatcggcaagtacgagactggcaaacgacctgagctctttgtcgagatgtgcaagcagactggcatcaagggtaaggtcatgtgcggtggtatcaaagctcccgacgcatggcacaaggctttcaaggaagctggagttaccaactacgagatccgtcagaacctgcaaggcaaggaaaaggaagatttcatcgcatctgcgaagttcactttcgtttcctcacagaacgaatcgtacggttaccttgcactggaaggtctgttcaacggtcctaccatgattgcagacagccgatgggcgaagttctgggaaggctatggcgcaactctgtttaccaaaaagaacatggctgaggtggctaaccgtctcaatgagatgactctgtgggacaacaccaagctggtaaagatgctggatgatgctgagaacaagtgggttgacgtgatctgtaatcgaaagaattacaacaccaagcctaactcttcgatgctcaaatatgtgacgccggaatggcagactcttgctgacctagcaaaagcgcgcgatgttcgtagcctgtcgagcggagactacaagcctctcttcgaccactgcgagatcgtccatactgataatgaatcaaaggtgagacgtgtctgatatcactgtaggtgaaatgaagaagtggcttgagcaatttgctgatgacactacgctgacgttcgaaggaaacttcggaccaggcttgcctcaaattgatctgaccaacgatcaattccagtataactcatgggaggcctggtcttactcaccagccaggcagccctggacttatacgcctaccgaggaagctaagtcgagaggtaatacgactaagacctacccatatcatcctgcgaacatcacactcggtgaacaatcgtgaatgacggcaaagcagttacgcctcaagaattgaaagcgtggatgttcaagttcttcggtgatcactacggccttcttgagtgtaagaaggcccttgccatgaatgaaagaacgagtgacgctgtaaagtggctaatcaaatcagacctgtttcggatctgattcctagcatccctgtttacggatgaattaatcaattacaatccttgcatgaaaattgtccaatttaagaacggtaggtttggtgttcgccgaggatccttctgggattacggttggtggacacatcaattcctagattatgaaggtacctgggtaaagaagcagggatacaatatcggttcagtggaatgctattccaaggaagaagctgaaaggcgactcaaggattacattgaatcggaagcttcatatcaggcctttaaggcatctgcaaatgatatgggcaaaccggtaaagtgaagctacatcgtcacgactaatccagtgacgcaaattatatgatgaacaacaggttgtccaactagccgtcggctaagcgtagtcgcgacgtgagatagagtgggcagggcgagcaatcgtcggaagtgcgtaatgtgagaataaggaaccgagaggttctaaagtatgacctgctctgccacacggcaacaggtgttaggcaagttgattactaactgaattcttgtctatggcgtgaatcccgcaaagggaccaaagtgcaattatagggcgataccgttcacctcgtcctgctgggaagcagattgcaagtttgagtggtgatggtatggacgcagttcccttttctcatcgtcgcacttttggtggtaatagccaaagtgtggctccaataaaccgcaattcttttaaaaacatattttatgaatcaatttcgatatgcaggtataggatctcgtgatactcctgtctccttaaaacaaacgatgatggacatagcttacttcttagcgtatgaagctaatgctattctcgtatccggtggagctcgaggtgctgattcgttctttgaggaaggatgcgatcgtgcaggtggtaacaaagagatctggttgccagaagcaggcttcaatggaagcaagtctaagttgattggtgcatcgaaggatgcctatatcgtagccgagcgatatgttggtcattggaagaactgtaaggcatgggcacgagcagcacacgcacgaaactgtcatcaggttctcggtgccgatctcctcactcccgtttctttcgtagtgtgctggacacctggaggtgagagagttggtggcactgctacagcgatttctattgcagaagataagggcattccgattctcaaccttggatcgaaagactggtctgagacagaaatttctgattggctagaaatccggctaaattgacctttctaggtactgtctgtagactgtatggactaaggtgattaggagttagtcatgggttacggaacacgtccgaacgatttcggtggaaacatcagaactttccagcctgacaatacgaaagatgtgctgtacatcgacacgactttttcgtcggtcacgttgaaggagatcatggagaagatccgtgaacacttcggcagcgatgatatcgagaaattcgatatcgaggctcagtacatccacacggattgcctgggctacgactgttatgaccccggcgactactccagcttcatcgtcatcactcgcacaggaattctgtaatggctgctcgattcagtcgtcacgcgaagcctctctaccgtatcaaccagcacggtgagctctacaaggcgagtgaagaattcaagaccaccatccgtcgagccggagtctggaaccgccctgcatgtttccgttggtgggctgaaggatgccgagagatcaacacctgggtattcgattcccagggtcagcatcgtctcattgtcggatacgatcctgagactgacctgttgtatctcggacgcaccatgaccgaagaacgccacctccccaaccgttttaagaatcgagacatctgatgactgctctgctgattggctccaacgcacttcgcgcacacggcatcgctgttgagcgcaggaacctggacatggacttcattgctacgatggattctatcaaggcgatgatcgatcggaacaagacgcgcttcgtcaagattcagcacagcgaagatgcgaaccatctgttcatgttccctcgtaatgggaacgacgccatcttcgatatcgaaatcgcatggctcgattctgtcagtgataccctcattgacatcgtcctgaacaacggtctctacaagatgaccgaggagggctactacgccgtttctccgtcggttgtgctggcactcaagctgtcgcacaagtacaagaaaaactcgcgtcacttcctgaaaacgatgcgtgacattcagatgctcaagggacttggctacaaggttccgaagtgtctgagtgagtggctcaaggatcgcaagaagtggacctacgactataagcatcccaagttggaaggtggtgtgaccaaggctgacttcttcaaggacgatggcattcgctacgtctacgatcacgacagcatccatgaagctgtgcgtcatctgaaaaagcctgcctatcgctacttccagcctgacggtgaggaagtgggcacgtctaaggaagacttcttcgctcagccgcgtgaggtacagcttctggcagtcctcgaggaaagctatgtgctgagtctcgagcgcgccattgttccgttcaacttgaagactatcgagcagcggaagaaggcttttgacactgctctggaaaaggtctgcacgagcatcacgtctggttggttccggaagtttgcctgggataactttgacgaagtgaatgacctgtataatcaggaatatgtggaccgcttctggcgcgaagtcgaaagcggcaatgtgaagccctacgtgaaggaagaaaatgcttactgaaactgcaaaggcgtctatcatccaaaaggtcgaagagatcaaggcgctgatggatgaagcaaagctgatcgggcgcattgacgtctcaggtcgtgatgcttacccaggcgatttcgtgatcgacgagatccgcaccattgctccggcgggctctgagcactggtcgcacagttcgtgctgggatgatgaacctgccccgtacgatcctccctcctggaatgcgagtaactgctaatggctaaagacaatttccaagaacgagtagaactcatcaagctccttgtcaatgaactggataaggaactgactgacctcaatgtgaagcacaacgtcgattacaagatcgacctgcaagtccaagacgaggacggtaattatatcctcggcgcccaagaatccagcgactggaacgcgagttggtgctgatatgaaggacgcctggtttgaagttgtaatgggtgcttctggagcatcactgtatgtctctgatgaagatggcaccggtcatcgtctttctggaagtaagccctggggtggtggtcatacagcacatcgcttcaaggtgaacatcgaggaagcaattcgtgaactagaagccctgcgtgacagggaagaggaagaggaatgatcagtccgtgtgatggtggcggaagtgtcgacccgggtcgcgccaagtttgaggaagctgtcttccggcagtatttcatcaagcatgttggaagtgatctgaggatgaagccaggtatcgtcaacaaggctgagttctgcaagcgggacgaaaatggtaattacgtgcgcgaagaagtaagcgcaatgtggtttggttggaaactttatcagaaggaaaacgtgtaatgaccgtcgagaaagaacgtcatcagaagatcgccgcactcctggacagtgcttccaagcagcttgaagaggcacgccagttggcaggcaacgacacctatcactggtctggtcctacctatggtatgggtggctggatcgagtctggcgaatggcaggcatctagccattcttgctgaggaatgagaaatggaatacgctgattttgaaagccgtaagaagcgcatcgagcagttgattggtgaggctgagggcctgctcgaggaagctcgagaaatgtccgatggtctctttgatgaaggcgcaacgcgttcctggcaggcaaagccttcatttaggtttgaaggcccttcgtatggtatgggtgggtcgctgcaggatggcgaatggtttgcatcgagccaatcgtgctaaaaagagtgaaagggtgggacattggcacttcggtgcctttgtccttttaggtaaaccaaaggaatatcatatgcaacgtgacttcatcgaaacctggtctggcgtcaacctctacatgcctgacccggatccagaatccatcctaatcgaagacattgcgcacgctctgtctaaggtatgtcgtttcgccggtcatgtggatcgcttctactctgtagctgagcactccatccacgtctcctatgctgtaccaccggaacatgccctccaagcactgctgcatgatgcaactgaggcttacctgtgtgacattcctactccgttcaagcggatgattcctgcctatgcggaactggaagacaatctgtgggcagtgatcgctgaaaagtttggcgtgccgttcaaactgcacgagactgtcaagctggcggatcgaatgctgctcctgtcggaacgtgatgcactcaaggaacactccaagcgccaatggcctgcggaatacgagaaccatcgtcgttgggaaggcttctatgaaatgaacctgacccaggaacaaactgctcgtgtcttcctcaagcgatttgcagctcttcggtagagtaaatactgggaagtaaaccccaacatggaattgaaatgagtaccgaagaaaaagtgagtgtgctgcctctgccggaagatcctgcttacctccagtggctgcgaaaggaaggctttgaactcgaaagcactgtccctatggaatcagacagcattgtctgggttcgtaagacaaagtatggagtgccacgttgtttgatgaatggtgttgtccttgtcgagatcgtgaagaccggagaccagtttagcatgggcgttcgtgcctcggctaagaattactggggtgcggcttccatctacggcattgatgaagagaaccttgtcaggctgggacgccagtacgaacagcgagtggtggacgcatggcgggaattgagcgcctaagagaacagattgtcgattaccttatcgcgaataaggaggcaatcttgatgacgcagcagtctcagttctgtggaccttgtggtggcatgaaagtcaccacagtctaccgtaacccagattgtggacaaattggagtctggcttgatcaatacagacgagaaacgggcacttgagccccgagatcgagagtacatcattttcgttctagatggagcatacgctcatggtgaaagtctatctgagcacctgcatctattcgacgaatttgagatcactcgtgcacaacgaaacgaagttatcttagcatccgactttggtcaagatgaggatcttgtttcagcaatcactttatttgggtgacctatgtcttatacttttacggacggcttgaaagacgtcatcaacggtaatttttcaaacggtggtgagtccaatcgcaggtacgaaatgtgcaaggcttgcccattgttcaattctgtcgtgctcacatgtggttcttgcggatgcttcatgcctgcgaaaaccaaactcgttaacgcaacatgccctgagggcaaatggtaaaatgacctaccgagacacgtatttcttcgacctgtgccgtgaggctgggttcgacgtaaccgatccgcatgattgggtcgaaatgagcattttctctaaggaaatgctgatcgaagaatcggaagaagactgaggcttgttctttcacagtgaatctataaactatgatttgtgggcagtgtgccccgaggtgaaatgaatgttcaagtgtcctgtttgtggtgattactccaattcggctgcttcattggagtcgcacgctgcttggaagcacggtcgacgcattcgagctgaaaactatcgtgcgccatcgtatgatatgacaccgtcaagtactggtgacgcacttgttggtttggctgtaggatatgctttgtcatcgatgtttgattcatcgagtagcgattacagttcgtcatcgtcggattggtccggtggtggcggagactctggaggcggtggcgcttccggggactggtaacaagttgtaaagatatagtggtatgaagccaatcgaaaggttgcttggacgcgggttcgattcccgccaggtccaccaagaacacatttgatcgccttagcgggctttctctagtcagagcggatcgtccttcggtgtctgacaagatgggaagcgtgggcaagagtaagatgacgtgagcaccacggcaagtgtgttgttgatgggcctgcccaggtttcgacaggcaggtaattagaaacgagcagaccactgttgagagtatccactcaactgaataaagatgcaaactagctaaatgtcgctgctaacgacgccgattactccgtagctcgctacgcctaatcgctcagtcctcgcccctactgagttcctcattggggcccctaatttcattcttcgaaagattaaatacgaagaaaaggcacacgaacaatgactgataacgaacaaccaaagcagagaatcaatcctcgcatctacggatggttgtccgatatcatgacctgggtcggagtgctgttccttggtgtcatcctcggcagcgcaatcacgcagtcgattgccatcaaggaccgtgatctgttggtttcatcctacacccagacgatcgcaacaaaggatcagttgattgaatctttgtcggtgacaacggtgaaggctgctgacgtagctctcaatcagagtacgactgaggtaaccaaggcacttgatacaatgtctgagcgcgataagacgctgcgcgacattgagaagcgaattgaaacaaagcagcgccaagatgcagcaaagaaggctgctgaggagcgtaaactgcgaggtctcaaatgagaattctcgtcctgttgttagcacttgttctcgctggatgtaagcacgttcctttggatttgacggaaccgtgttatgtgccacaaaagaccaccgagtcggttgatgaagctgtaaggcttgccaatgaccgtcacgatgctcttgtggagtgtaatgcgaaactagaaaagatcagaacgatcttagacccaaaggccagtcaatgagttttgaaacgtacctgaaagaatcagcagcagctgaggaagcacacaaactgggattgtccgcagccggttatggcctttggcgcgacaagaccggtaaggtggtgaagaagaccgtagatgataaacttgtggacgttcgtggctctgaggcgaacctgaagcatcatcacatcaacattcctcagaaccgtgaaggcaaccatgcagagcacgatcagtcttcggacattgtctctgcacatgagacacctggaacattccgcgaaagcgaagtgaccaagtatcacatcaacgaacactctgcggtacatcctgacaaggctggagagctgcacaacgcattggttggtgcaggctataagcattctccttcagcgtttggtcagatgtatcaaaagggtaagacctcggtgatgatctccaaccgtccagagattagcgcaaagcgcggcggaaagaacgatcatcacagtgttctaattcgtaccgatcatgtggcaaagaagaagcctaagaagtaaacctttgaggatttgattatgagcaggctggaagattttgttatgccggtagggaccgaagagattctcttcattgatggcgagcatcgtgtggtaaagatgaccgtcattgatcgccgtgaagcaggtattaatctgttccacaattttcatatccgtatgttgcaggatgcacatttcatctatggtttgaaaaagaaagaggttctaaagtctcgttggggtcacatgacacctgatgaatcttttgaccttgctcagtcacttagcaggatcgcgctggacctcggtctggtagttggcaatggagtgagaatttaattatgtgcgttgtttcgatgattggtgactcgttccaggatcgttggaaggatcgtcttccgaatgattggaccattccggcaatgccgatgccttcgcagcctatggcacctccgttcaaggagcgccgcattgatgtatcgcatccgttccaggcgatcagtcgcgttgagtttgacctcctgaaaaaggaagtcgaaatcatgaaggaccttctggagcgtgctatcaagtacgacaaggacaacaatgagcctcattgcgagacggagagcaagatcgcattcctgaagcaagtggcaaaggctgttggcgttgaccttgaagaagtcttcggtaaataacaatgaagagcttttttgacgaacagggtagcttcaatgaggacgcccagcagttcacaaaagacgcgcaagagatcctaaggccactaatgcagaaatatgccggtgccggatttagctcgcgtgaaatagtttacctcatttcagatgtggcttcgattgaagagatctacatccgccaggtaaagagaatcagagataagcgtccttagatcagttggtagatcatctgctcgacacgcagaaggccacaggttcaagtcctgtaggacgcaccaagttttgccttagtagagaatggtatatcgggcttccttaaaagtcgccgtcattgtcggttcgagtccgacctaaggtaccaccttcataagcgcccaggggtgcagagagtttcgctagtatctcgctgcaacgacgtttattgaaggaacatgactagcacagaattcgcctcagtagagaattggtagatcggctccgctcaaaacggagtgtcattgtcggttcgagtccgacctgaggcaccaagatgacaaacgaagaaaagatcgctgcaaaggcagcagaagtagtacactacgaaggagtccttgaacgttacggttcgggtcgttggcttgacatgggtcgccgtcacctggctgaattgaacagggaacttcaagagttacgctctcaaagtattgatggtgatacgccgccctcgtaacgcggataagacagttcaagtctgtctgagagcaccaaaacctggctatgtgggtgagcggtttagccgacgtcctcataaggcgtttcacgtcagttcgaatctgaccatagccaccaattgaaacgagccctgttcattcagggcttttccttggctggtcaggtataagtccttgatactctattgttcatagtgggtgtcctgtattataaccactatagcttgtgggtaaataaaaaccccgtcatattgaggaagtcaggtgtaaggcatgggcagaaaagaaatcaacgtaacaaagagaaacggcaagcgtgagccgtatgacgtggcaaagattcagcgccagatcgaatacgcatgtgatgggattgctaatgtatcgcagtccatgattgaactctcgatgaacctcgagttgtttgatgggatcaagacatctgacattgatgagctggctatccgagcagccgtgaacctgatcctcagcgaagagggtcacaccaactaccaatacgttgcgggtcgtctggcatcatacgctctccgcaaggaagtctatggtcagtatgaagtgccttcgctgttctcgattgtgaagaagaacgtagccaagggcctctactcggatgaactgctgacctggtactcggaagatgagtggaacctcattgagacctttgttgaccacaccaaggatgaacgcttgtctcatgctgcaattcagcagttggtagacaagtatctggttcgcaatcgctccacaaaggaatacgttgagacacctcagattcgctacatcgtagctgcggcaacggcaatgcacgctgagcctgcaaagcagcgcatgaagcgaatcaacgaatactacaagcaggcttccaatggcgaattcaccctcccaactcctgtccttgccggtcttggcacaccaactaagcagttctcaagctgtgtcctacttcgttctgacgacactcttgactctatcttcgcaactggcgaaatggtggcaaagtattcggcaaagcgagctggcatcggtctggagatcggtcgtctgcgcccagccggtgcacctatccgcggaggcgagattgctcacacaggcttgaccctcttcatcaagaagtggttcagtgatatgcgtagctgctcgcagggcggcatccgcaattcgtctgcaacgctcacctacccgatctggcactacgagtttgaggaacttatcgttctgaagaacaaccagggtacagaagagaatcgtgttcgtcactttgactactcggttgtcacctgcaagtacctatggaatcgtttccgtaatcaggagatgatgaccttcttcgatccgaatgaagtgcctgacctgtacgaagcatactaccgtgatcaggctgagtttgttcgcctctacgagaagtatgagaagcaggatggactgcgcaagcgccagctcaatgcagcagatgccttcggtgcattcctcactgaacgctcagacaccggtcgcatcttcgaggtctacatcgacaacgtgattgatcagggtccggttgattctcagacatggcctatctatcagtcaaacctgtgtcaggaaatcttgctgcctacgcgtccgttccagcgtttggaagatgaagaaggtcgtatcgctctctgcactctgggttcgatcgtgctgggcaagttcaagaagcctcaggatatgcgcggcgcatgccgtactctggttcgcagcctcgacaacttgctgtcctatcagatcttcctgtcaccgcaggctgcgaatgcaaatgaagacttccgtcctctgggcattggcatcactgacctggcacactggcacgctcaacgtggctacacctacggtcagcctgaagcacttgctgagtttgcaaagtggatggagcacattcactactactgcatcgaggcttcgattgaactagccgaagagcgtggaccgtgtaaggaatggaagaacacttcgtatgcagaaggcattctgcctatcgacaagcgttcaccaaacctggatgaagtccacaagattgagttgactctggacttcgatgctctacgtgagcgtgttaaagtttcaggcatccgtaatggcctccttcaggcaacggctccagttgaaagctcgtcggttgtggttgattcgtcgaatggtatggctctgcctaaggcactgatctctaccaaggaatccaagggtagctcgctcgtacaggttgtcccggaatacgagaagctcaaggatcgctatgaaccacttctcatgtggaatcagcgagactgcgttggatacctgatgacggctgcactcaatcaggcgttcacagatcagtcactgagtacagacaccttctacaatcctgcgttctttgaaggcaacaagattccggcaacattggttgctaagaacatcatgaactaccatcgctggggcggaaagactttgtactacagtctgatgaacaagcgcggatcgaaggatggtctggaggaagtgaaggtagaaacagtcgttgaggaggtcattgcagatggagaagactgcccagcatgtactctctgagatcgattggtctacagtaagcattggatgtcctattccaggtggcgcacgcccctggactcaggaggaaagagataggcttcaagaggcgatgaaacagatcatcgcccgtgaggcagaaatgagagctcgtggagagattgaatgagtcagtttgatatcagtacagaaaccaactaccttgaccgcaagatgttcctggatggtactgttaccatgcagcgcttcgacaaggtgaagtatccgaagatccagcagtatgagaaagtccagcgcggattcttctgggtgcctgaggaaatcgacgtcaccaaggatcgtcaggacatgaaggctgcatctccggcaggtcgacatgccttcaccagcaacttgctgcgacagacgacgcttgacagtgaacaaggacgcgcaccgctgcagattttcggaccggttgtgtctctacctgaaatggaagccctcctgtctatctggggcttctttgagacaaacctgcactccaacagctacagccatatcatccgcggtgtctatccgaacccaggcgaaatctttgatcaggttcaccagaaccaggagatcattgatatggcagcaagcattggtcgctactacggacgccttgatgatttgaacgttcgtaaggcgcgcggtgagaatgtagacatcatcgagcacaagaaggcgatctggatggctctgcacgcatcctacgcgctggaagcaattcgcttcatggtgagctttgccacttccttcgcaatgatggagaacaagctcttcatcggcaacggtacgatcatcggaatgatcctgcaggacgagcttctgcataaggaatggactgcctacatcctgaatcaggtgtgcaaggaagatcctgaattcgcaatgatccgcgatgaaatggcggaagaagtctatgcgatgtatgaagaggtcatccaggaagaaaagaactgggctgtgtatctcttcaaggaaggtccaatcattggcctcaacgtgaagatcctccactacttcgtagactggactgctaaggaatgtctcgaggcggttggcatcaagtaccgtggtgaggctcctaagtcgcatccgattccgtggttcttgaagcatgtgaagcaggagacgaagcagactgctctgcaggaactggaatccaccgactacgtaatcggctcactgacgagcactattgactatggcgacctgcccgtactgtaagaaggaagcaacactcgagacgggtgaaacgatctacccacaccgacctgacctctacacgctctacttctgggcgtgtatgaagtgtaaggcgtgggtaggttgtcatggaacgtctcagatatcaatgggaagactggccaatgcatcttcccgtaagctaaagtccaaggcacatagcttcttcgatcccatctggaaaactggctacatgacacgcacacgcgcgtatgcttggcttcaaggaatgacagggctctcagcagatgactgtcacatgggaatgatggatgatgaaatgctgaggaaggtggcaaagatgtgcagacaatttttacttgaaacaggaattagaaacgatgtatgagatctactcgaaggacgcttgtccgaactgtgtcaccgctgcctcactcgcagagtcgaagggcattgaattcaaagtcttgaagttggacaaagactacacccgtgaagacctcttctcgaaggccccttcggctcgggctgttcctcaagtctttaaggatggtgtcctgattggtgatctggcggcgtttcgtcagcaccttgtaagtgtctgattcttggaaaactgacccgaactgactctatgagagtcagaaattgactcgttcttaacatctgcgccgtttggttcagattggactaagaacgggtcaatttcttgtcagagcctcgtgaagagagcctcagaacccttgatacctctagcaatgaaaaagaaatgaagattcaggttgtgccttaacgctaccttcattaacattcgattgtggtcagcgacagggctcagaaaggccagtcggactgatcgaggggttccaacatggggacaacatgaagacacagaaagacgcgatcaggcgcgagctgttagatcgtgcgacaggtaaaggtagagagccgacgtgggacttggacgtcgagccgaccaaactggaactggtcaaagcactcaacttctactcggcaatttcgacgccggagacactcaagaaatatgctattacgtgggcgagaaagaacgccccggaacgccttggggtcgtagaagcccaacccgatttcaagttccagacgttcggtgcgcttatgcgtattgaaagccgcggaatgaagcttccaaaggcagagaagaattcgattgcgaaatttgtgaacgaacttaatatgcctttcaccgaaccgaaacaaattaagccgaggaagaaaaagatgtcgaccgaaaacgtgaactaccgcaacttctgcgacgccctggacaaggccaccgaagcgacggagttcgtcaagcccgatctgaccgttgatccgaaacattcgacggcgtcggtgatcgaaacctgtcagcgcgagctggaagcgatcaaggaagacggcgacatctatccgaagcacatgacgcagtggttcacctacgtcatgaagctgatgaacggcggcaagctgccggaaaaggcgccgaaggaagtcaagaagcgggtcgaaactgtcgtgaacgacaactccgacgacggtgatgacgattcgactccgactcgtcaggcacgcgccccgcgcactccgaagaaggtcgcgtctgccaagggtcccaagaccccgactctcccgaagaacgatccggtgccggctgctgaccacgttctcaacggaaagaaggtcgctttcctcttcgacactcgctacggccgcctgacccggatggtctcggattcgaagaacggcttcgagatcaagggcaagaccatccacaacatcgaccactccaagtcgaaggtcgctctgctcaagaacttcggcgacgcgatgcagcccggcaagaacacgaccgacgaactggtcggctggatgagcaagtgcgtcaagaagggcaacccgatctcggtgggcagccgactggcagaagaagtcctggtcctggaagccgcctaaggcacaacggccctagggagaaatctctagggctttttcattggtcggagatcgtaatgagccgttgttcctgtaagaccacgacgcgcgaaatgacctactcggagttcgttgcctgggcacacgagtatgtcactgagagatttcttgtcggtggcctcaaggccatgcgcgacgcgatggaaatcgtcgtccagcagcagtccatgaaccattcattcaacaagggaagcttcccgaaggcggacaaatgagcatccgtagttggtggaagaaaaacgtcaccgaaccccgtcgtcggaagaagttcttcaaccttcgagctcggcatggctcgtccactcgataccacttcctgatggtcaaggaagccctcgaagatctcctgtaccgtttggattccaccggaactgtgtctcaccccgaagccggaatctgtttcaacgcaggcttccagattggcggggattggcgtgatgccggtgagaccttcctcagcctggcagaaatgttcaactctgaggttcgaggcctcaagaaaaagttcacgttcttcaccgacaatttcccgttcgaagacgtcgacgccctcgatgggttttctctgaacaagtgggttggtgagtccctgaaggtccggcgtgcctgtatcgaatggatcctcgacaacatcgagaagcatcaactgcaccggggttaaatatctcgacacatcaatcgagaacgaaacgtggccaaggtaccctacgacaaggcgaagaaaattctgaccactctgtaccaaacgggaggacaggtttctcgtgatccggtaggtcagaccacgccaccgaagggatcaaccgtaccgaagtccgtcatccaagcggcaacgccagaaaacaatctgagggtgacgaagcagccacgcaggaatgtgatcatcatcacacccttcatggcggaagatccggctttggcagagaagatgaagaggtacgctgctcgagcgactaaggactcgttgaataagaacgaagccccgctcgcatcacacctgttctactactcagtcttgaacgaaaaggatccgattgaacgagacattggcctccaatctcagctgagttggctcaaggttgcagacgtggtagccgtgtatgtagacttctccgtaacacctgcaatgaaagtggcgatcgacaacgctcgcctcctacagaaaaagatcgaattccgaacaattggagcagtggcatgattcgtgattacaccaacttcccgcaccgcgcaggcgatgtctatcgactgggtgagtcgaacctgtactacatcctgtccattgtcgaaggcgactcggtcaatgacgactggctcaagtatgccctgatcagcctcgacggcaaccgttggtgcgagcctatcgcacttgaccgttctaatgaactccctgctgacggtctgacggaagaagagttcaccgcccttgtcagcgcagaggaccgagaagctttcgtcaaggcttcgggcaggctggttttcgcctcgctccactgacagtccaattcggaccaatgctggccaatactagcatgtgaaggtcagcgtgaaatctgacagtctccgcagccctatgaccgtcagacttgttcagatttcaccgggtctgacgtaagtgtctgattctattggggttctggttgtgaaggggtaccacgtaagtgtctgattctattggggtcgtcacacatgaaggtagcgtttacagctcgtgacgggctgacaacgaaactttaacgagtctcttcacaagacccggagttctgatacagtgtctgacaatgatgtagagaggacgtgatcacctgtagcatgagtcttgtcctattccggactctgttgaggaaatatcatggctctttatgcaatcaagcacatccctaccaatcgcttctacactccaaacacctcgggtgctttccgcaccggacgcaactggagaaagggaaaaggtgtattgtttacggacaaggctgacgcggtgaatgaagtggtaagcctgatcaacaagcatcgtaacggtgaagagcagcttcgcattcgtacctatggcggatacgatgttgcacgcgccgaggatgcagttggtgatggatacattcgtgatcgcgatttcagcgtagttgacgtgaacgtttaagtttcctccgtgtggcgcactggccaaggatggccacctattctattccttgagaacacgatgacaattctttcgatcctcaatcaactggctgcgacttcgagccgcctggccaaagatgcaattctcaaggacaacgcgtccaatgagacgctcaagcgagtgttcaagctcgcatacgacaagaagatcctcttctggactcgtactatcccagatgaagccagctggtctgacgatcctcccttcatcaatcttgacggtgcactcgaccagatcgagaagaacatctgcacacgcaaattcacaggcaatgcagctgctggcttcctggcaagcatgttctcccagctcgatcgcgacgatgcaacggttctcaagcgagtcatcctgggtgacctgcgtgtcggcggaactcgcgaaacggcaaaccgttgctggcctggcctgatcgcaaagccttccttcatgctctgctcggcagactacgacgaagaagagatcggcttcccggcgatcagtcagaccaaggaagacggcgcccgttgtcgtctggaatgggatggcgagaccgcaaccctgaccagccgtgcagacaacgaaattacgcatcatgcgacgttcaacgattgggcgtcaaagcacctacagcccggcgatagcctagacggtgagctggtgtgtttccgtgacggtaagcgtttgagtcgtaaggactccaacggctttgtgaacaaggccatcaagggcaccatcagtcctgaggaagcagaaatgctgaccctggttgcatgggaccttgaagacaagactctgccctacaacgagcgtttcgccaaggtccagtctttcgaaggcaaggtgcaggcgatcgagtctcgtatcgtccattcgtatgaagaagctctggctcacttcaaggaagctcgtcgcgctggtctggaaggcaccatcctgaagaagtatgatgctctgtgggaaggcaagcgtgtcaagttccaggcaaagttcaaggctgagatcgaagcagaattccgtgtcgttggctttgactatggcaagaaggggaccaagaacgagaagcgagttggcgcactcaaggtccagtccgaatgcgggcaggttgcatgtgacgttggcatcttcaaggacttccctgacacgatccgcgatgacatgctgacggatctgccgaccatcatcactgtgcgatacaacgagcgcatcacgtctcgtggtcgcgatacgcagtctctgttcctgccgcgcatgatttcgattcgcctggacaagaacactgctgacaccctggatgacctgatcaagatcgaagcggcaactctggaatgattgagtcttccgtacagacaagagaaggcgatactatcggtttcgcctatgagattcgtcacggtgaggatttcgatcctcgctgtggcgtgtgtacccagtacacggaatacgtgaacaagattctcggcgagtggctgcctgaggcattcatcgttgaggcagattggttgaacacgaatagttcttccggtctcaacatgcgcaagatgttgatcatcaagagtggtcctgagccggtgctggaacgacttctgttctggctcacttccaactttgatgagactatcaaactcgcatcaattgattcgattgtgttccgtgaactaagcacacagaatgagtactcctataccattcagtattgacgctgtaacccatcaaccaatggagtcgtaatgagcattacctttgagcagtttgaaaagcagattgaacccatccacagcgcttattgtgccaagtacaatgagcttgctgttctgcgacgcgagttccagaagctggcaaatcagatcagcctcgacaatgtcgaagatgaagatgagcgcgatgacctgcatgaagaagtaagcgaccgtcttgccgacctgacctacgatttcgatctgcaatgggatggtttcgagcagggtaacatcaacttctgggttccgagtacttgctaatgaccactgaaaccaaaacctcttttgaagcgttccatgaacaagccacggacctctatagccgcctggccttgatcgatcagctgttcaaggaagctgatgctcttgtcaggaacgtcgatcgttcttcattcactgacgagcagctcgatgaagcctatgaattggctcatgaaattggatacgctgccggctggcagtttgacagtttcggtgaaaatggcggctactggcagccttcgacctgctaatcattcaaccaaaggaaatgacaatgagcaatcttgatcttgtgaacgccgccattgaagccggcaagcccctgtacgacgaatactacaagctgcgcaacgttgcagaccagaagctgcaggaaatcctgggtctggtagagtctctcaagctggaccctgaggacaaggatgatgaagaagagatcatcgagatcatcactgacctgggtagccgctttggtcatgcgtgggaaggtcattgggacgtcggcggtcaatgggacgttggtgacgaaatccagtactgggaaccgagcacctgctaatgagcaagaatgaagaattgatgaaggaactttatgagcggacaaaaccgctcaggaaagagtttgacacactcaagttcgctctggataagaagcgttatgagatcgcaggtctcatcaacactctcgaattcgaggagatctctgaggatgatgaagaagcttacgagtctctgattgacaacatcgacagcttcatgagctccttggacctgacttggactggcggacgctatttcgagtggggcgacaaggattggaacccaggtgaagaaattcactactgggaaccgagtaactgctgatgcacgtaatcaaggcacctgttcgtattcgcggtctaccgcagcgaccaactgtctttctggctgggtccattgatatgggctcagctgttgaatggcagactcgccttgaacgcgaactagaatacttcccaggcacgatctacaatcctcgtcgtgatgactgggacagttcgtggcagcagacagatagtgatcctcagttccgaagccaggttgattgggagcttgatttcatcgagcactccaaccatgttttcatgttcatctctaaggacagcaaggctccgatttctcttttggagtttggctacatcgttggtggtgaacagaacccggacaagctattcatctgtgtcgaggaaggcttctatcgccgcggcaacattgaagttgtctgtcgcagacaaggcatcaagctatacagtaacctcgacgaagcaatcgaggcattcaaaatcaaactggcaagtgatctatgactgaattgttctatccctcgaacctctctaagcctatgcctgtattccttggcggtagcactgcaaagggcgactggcagaagaaggttgtggctgcattcgaagacacgcatattcccttcatcaacaccagtcgccctgattgggacgtcgttgaaccgaaccgtgaacaaaagaacgaacacattgcgtgggaattcaattggcagaagcgagtgctcaatcacttcatctgcattccggcggatgcgaagtctcctacagtgatgctggaactgggacttgcgatttcgtgtcatggtaacgctgtggtgttcattgatccggagtattcgcatttccacaatgctcgtatcgcgtgtgagacctatggtgttcgtgtgttcaccgacttcgatgaagcggtagaaaagttaaaggacttgttcctaacttctcgcctattctgagaaaaacggcataaatactcatatgaaaacaattctcctcacatcgaaaaattggcatcaggttgcagctctagctgtcaagcccgccgacgaacgatatgtggctggatttgatttgaatactgggtacggaatgagttgaaagattgattttcaacttggctttctggacccaggaactgaaaagtttctgggtttttacttagtggtgcgaaaaggttgataagaaaggctgtccatgtagcatatggtttcaggacttttaaacattgacgcgccgaggagcttatgtgaaaaacttgtacttgacggtaacaaactttctgttaggctttggcacgttgcagccgttttgggcgacgagttacctactgatgaagttaggaaccgtttcaggaaacatgtaagaaaaggttgtgtagaaaacagtttgatgtaaactacgcaacatgaagtaacaggcgcgcagcaaagaagctgacgcgacgttctttaaaaacaaagattcaagttatacgtcgttagttcaattggcagaacaccagcctccaaagctgggtgttgagggttcgagtccttcacggcgtgccaagttttatgtctgggtagcaaaacggcaaatgcgctggcctgcaaagccatgaggtgcgagttcgattctcgcctcagactccaagttttatatctgtgtgtagctcagtctggttagagtactcgctttggaagcgagtggtcgttggttcgaatccaaccacgcagaccaagttttatcccgttgtatccccagacgctacgaacgtctacaaaggtaactggagtggcgccaaaaagcgctgatgcaggttcgaatcctgtcgacgggtccaaacagttctcggacttaaaccgagtggtggaggataaactgagaaatcagtgaatcccttgacgagatggagtcattaactcgatcgagaattttgggctgctcgtataatgagtattacacctgccttgcacgtagggaatcggagtttgattctccggcggtccaccaaaacttggggccttagctcagatgggagagcaggtgctttgcaagcatcaggtcatcggttcgatcccgataggctccaccaagtttagatatgccctgttggtggaattggtagacacgcatccttgaggtggatgtgctgaaaggcgtgagggttcgagccccttgcagggtaccaaacaagactgttcaatcagtcgaacgagttggaaggtcgggttcgaatcccgaagtgatgacgtccggattaggtcatcatttggtgtagtgggcagcacgccgatacattaaaaggttgcgcagaagtgtgcttcatttagactgtgaacacagtcaggcaagtcgatcaaaagacgcgccgacaagcccgaagcgagttcttcggctaagaaggaaagacatcgtttcctacttgtaacgacaagtccttagaggatgaagtctccgttagtcggacgcctgagagtggcgaaaaggattcttcggtatttcgggttgcaagcattaaggtgatgcaggaggcttttaaccttcagaacagggatcgttaccctggcgacccaccaagttttaagccccgttggctcaattggcagagcagctgttttgtaatcagcaggttgggagttcgagtctctcacggggcaccaaacaaaccgagaagtggtagttaacaactatcggcggcatcgggagaggatgacaagagcgacagtcctcaacgaattttgcgggtgtggtatagtggttgtgccctagccttccaagctagagagacgagttcgatcctcgttacccgctccaagttttacgatgcatctgtctgctaattggaataggcaacgatcctttcaagttcgggaatgcgggttcgagtcccgtcagatgctccaagttttgctccactcgtctagtggctaggatgacaccctttcaaggtgtagaagagggatcgaaaccctcgtggagtgccaaattatgcgcctatagcacaactggatagtgcatccgaattctagtcggatggttgtgggttcgaatcctactgggcgcgccaagtttcaaatggataggtgggcgagtggtttatgccagcagactgtaaatctgccgcttaattgcatcgttggttcgaatccaaccctatccaccaagtttatgtgtctgctgtcgggttggaggacggcaccgggctgtaaccccggatcctcaaaagggacgtagtaggttcgaatcctaccaggcacaccaagttatgtggttccttagctcagttggtagagcaacgcttttacaaggcgaaggtcgtgggttcaagtccctcaggaactaccaaacgttgaaacaggttgtgtagaaaacagcttggtatacaataagcaacatgaagcaacgtccagaccactgaagagtcgccgggacgataaacaaaggcacgaaacgtcgagaggcacaaaacattagcctcgtgagacgtctggtctagcaactcaattgtcgaaaggcgattgtttaggaatacggtacagtgatgtgcctaatggattaaacgcccacaagcggtccgccagagatggttcctctagaacaagtcgacatagtgcagccgaaaggttggcgtctagtatccctaggcgatatgtggaggctcagtgagacacgagattcaggtccaatgccgaatggtgaggatttgatcgtttagcgacggtagtgtttcggcttagcggcaactgactccaaggacattgaatcggcaggtacgtagttcaagccttagcgggtaagggcgagtatcaggtcaggcggactaatgttcgtactgtatcactcggacgtaggcttagcggctgaaacgagaggaggtcgggtaagaagctgtcgcccaaaaggctatggacttacgaacctgctcgaccttagtgggctttcaactttgacggttaatcaaaactacgaaaaacgcaaagtcaggttcggtcgtaagtgaaagtggcttaatcgttgacacgaaagtgaatcaacgcaatttgaggctcgcaaggctgatgattgtctatcaggaagtgcacctaagaggaagcccctctgaatggctcgcaaggtcaagggaaacgggaaggtagagtagcttacgatgacagaggaaacgccacctctttaaactaggcagccatgacggttaacaatgatgcatcgaaagatggttgttgtggaaaagttgggaagggctccgcaagagctgataatccaaacgaatgaatcgtctcgtcagactgtattctcaggtcgacactttgtttcaaggagttgtattcctcaaacgcttcaattgaagtttttgcgaaatgcaatttttggtcccatagtttacgattggttagaactcccgcctctcaagcggaagaatcgggttcgactcccgatgggactgccaagttttatacgcgtgtagctcagtggcgacgataagttcaaagacggtaggcataccgtcacgcagagcgagtcgaggattggcgatacgactgtgacgatacgaaggtggagctcgagatcctagctccgacaataacggtacggtcaacattcgagagcgccgggtagataacccggaggtcagtggttcgattccattttcgcgtaccatataagtagagtagtacaaaagttttatccgggtttagctcagtctggcagagcacgccgtttggggcggtgaggtcgtaggttcgaaccctgcaacccggaccaattagagaagtgttatggaaactttagaaacgaaagtgacacgtctaggcaatgggctttatggatgcaggatcatcaggtcagctgacaagaagccaattgttgaattaagagttgaaaagtctcagattaggaacgctatgtttgacatgctccgaactctagacaagctgggatatgatagtcctatggcacatgcttcgcgacatcgcggtaaggcttgtgtcacagactcgaaatatatctggcattgatttattctggacgcgcctaatggggaggcaccgggctgttaacccggcgatagaaatatccgacacggttcgattccgtggtccagagccaaatatggattacaggccaactggtgtaggcatgcagctgttaactgcagattgttgagttcgattctcaagtagtcctccaaaacaaacggtctattagtctatgggttaagatactggcctgtcacgccggtgtaacgagttcgagcctcgtatagaccgccatagttaaaacgagcatgggtctgctgggtgaagattttgcgttgtcagcgcaaagatgatgggttcgaaccccatatgctcgaccaaattaagaatgatgcgcggtcgtataacggcagtatactgggctcataacccggagatggaggttcgattcctccctgcgctaccaatcaacgggtccgaagctcaaatggcagagcaactggttcttacccagtaggaagtcggttcgatcccgaccggacccaccaaacaatggactcgttcccgtagttggtcgaacggagcggactcttaatccgacggcgaaagcccatcgcaggttcgaatcctgccgggtccaccaaaatgagatagatatgccgaagtacaatttcaagtgtagcgaatgtgagcaccgcggtgatgtctggaccggcgatactgaaaaggtcgacgtggactacaaagacgtagagtgccctggttgtggaaaaaagacctacaactatgctccttgggattcaggtgcttcatctcagtcatggggtcatgtgaagcctacaacactaggcagacagaaggctcctcaggattttagaaacttcctgacacagattaagaaggcacatccaggttcaacaatccgagatcattaatcgaaaaggtgttgtgatgtacgtgtatcaaacatattatgtgtacaccgagagattttgtcacccagacccacttgagtgggaagaaattcgtaaagtgatttgtactacgttggatgagagcttggcgcaagaagttgctgacgctcacaacaaggaacacaacaagatttcaggttacaaagactacgccaccgttgcatgttatgcgttggcaagtcgataaagaatcgccgttcagtagctcagttggtagagcgcccgccacgtagcgcgggaggtcgtgggttcgagacccacttgggcattaaggcgctagggcgaatttaaagtactcacatactagttcgagacagtatcgcccggatcctataattgtcagcaggtaatggtcatgcagaagaaaattgacgtgaaagcagtcgaggcgttcatgcagacgcagagccctgagacaaaagtttatcttggagcagactccgagaaggtaaaaatcaatggtaagatgtacgcggattacaccgttgtcatcgttgttcacattgatggttgcaagggttgtaaggtattcgccgagacaactcgtgaggaagactacgataaggatccttcaaagccgttcactcggatgatgaaggaagctgaaaaggtagccgagcttcacgatcgtttcaaagacaccttctacgacttcgaggttagtattcacctcgacatcaacccgaagaagacggcaggttcaagtatcgcaatggaagcggcacgtggttacgtcaaggcgatgaccatggttgatcctcacttgaagcctgtagcatttgctggttcttatgctgcggatcgcgctaaagaacttggtatgtgctaagagatatgcccctgtaggcgaattggtatagctactggccttagaagccagcgccgaaaggcattgacggttcgattccgtccaggggtaccaaatatgtcggagtagctcagttggtagagcggtagcttgaaaagttacgcgtcgcaggttcgattcctgtctccgataccaaaacaccgtcactcaggtccctcggtgcaaaataagggaatactcaggagaggagattgtagtatgaagttgccttcgcgttttcaaatcggtgataaggttctcgctggtcgtcttgatggcgggagcaaaggtgaagtaattggtgtacacttcaaccgatacaaagtatcgtatgatgtggtcgacgagttgacccaacgtacaaagaagcacctcagtgaacgggttcatcctgtcacagagtaaatacagatataagacaatttgcatcgttagctgagatggattagcgcttgcctgaagagctcgagaggttggttcgataccaacacgatgcaccaaacaaaggaacgtgaatgagctttaagccggttaatactttcgtcatcgtaaagcgtagggaagaagatacaacgagtcagggaggcatcatcatctctgggtcagttgatcataacctcttcactgttgtggccaagaatgatcttgtgacattcgttgagcccggtgatacggtagtaatcaacattcgcgaagcggctgaaatcgacgatgtacattacgcagttgatgcaaagcacatcttcaccaaggttgctaagtaagatagttttgcccaggtgacggaattggtatacgtactgtcctcagaaggcaggttttgagggttcgagtccctctctgggtaccaaagtttcagtgttccacgtgtcggaattggtagacgagccagactgtgaatctggagtttgcgggttcgagccccgtcgtggtccccaaagttgatcaggtgattcgccaccttagagtgcgaaattgaaatattgcctgttagctcagtggtagagcaatcgcccgataagcgataggtcgtcagttcgatcctgacacgggcaaccaataagccttcatagctcaaaggtagagcactcgcccgataagcgatagacctaggatcgttacctagtgaaggcaccaaaccgttgacgaaacagcgtaagggcgctaaagtagtacgcaacaaggtattctagttggagccttgcaaagagccggactgttaaaggttgcggcgagactagattggtagcttaattagcttacggtgcatcatatgttgctagggtatgatgactcagaagccttcgggaacccttaacttagctacaaattctatagcccagtcgtttagttggtccaagacgccgtcctttgaagtcggtcatcgtaggttcgaatcctacctgggttgccaagtttgatgcctcttagttcaatggtagaatgtcgctctctgaaagcgaagacaacggatcgataccgttagaggctgccaaatatgggactgtgccggatagctcccggacattatgatgttagtatgcagaatcaaagcactgtggacaggtaccgggacctttgtgatgattcttcagaacgttgattgatgcaggtcccgccagatgcaaaagtaagactagccgttcaagtcggtaagcacatggtgtgcaccatgccgcgttaggtgtggaggaggcgttcgaatcgtcggtggttgccaggcccctatagacactgcttgcaagagggatttaaagtaaccaaatgaggtcgctcctcgcggaacagttccctcggtactattctatgaaggttgtagctcaaaggtagagcgccgggtgtcggacccgggtcaaagagtatgaagttcgcgcgaactgtctgctcaggtgcaggagtcgaagcctgtcagccttcccactaattgataatgagagacgatgagacagttcaaccttcgtggtaagaagacatatcgtcctggctgtggttgttgcgttgttgaaaacttcaagccagaaatcattgacaagattcacgcatacgaaatgcgtaatccagatgaattcgctctcacagcagacgatttcgattgtgtagaagattttctcatttatattgatgttcccgttgaccaagtttgttatgatagttcacactgcgctcccttcaaaggcaaggaagaaagccaagaagaaggttgtaccgacaaggacgccagttaagaagttcgttgaaaagaaacgacagttcattcccaagatacccgtttaccgtgcagcaggaaccgagcacatccgatcacatggattggagaaggtgccgcctaaactggaacgtccaatcgtgtatcatggcgatatggctgaacgtgaagcggctgctcaagatcaaattgagtaccgtgagcatttggttagaaacgctttccgtaacgggaaggtatcggcatgctacatttcaggatgacctatgaatactgtgattgaaaagactgacaagggtgtgatcaaaggcgcagtgttcatcatcgccggcgataggcattgggttgagggtaatgtctacggcaaccccaacttcaaggatggcacctatatccacacgtccaagattgttgcagttcgtggacgccgcattgaaaccctgaactcgttctacacttgcgagttccacgttgatggacctgttcgcctatggtaacccaagttcgtattctgattgatgagtgtggtgcacctctggattccattgttgaagtgactgaaatcttggatgatggtcacatcatgtatacctgggaagacatcaccttcatggcttcaccggaagcctgggcattgcattatccggattctgcatatggatatgattctcagagcgctggcacagacatcaactacgagattttgagaaacgccgctgagcaattcttgacgtacgtcgaggaagaaatgatcgacgatgccgccattgattacttctacgacgtgttcaaggaaactctcggtaagtagaaatattggagcgtaactcagccaggtggctgacgctgtttgctaaacagttgggaccctatgaacgggtctggggatcgagacctctgcgctccgccaatttggatttgatcatgaaaatcgtgctgcttgatcttgagcaaactgtgatcgacgactgggagcacatgaacctgcttccaggaaacatcgataagattcgctgggcaattcagcacactggctgtaagctgggattgatgtcctgggctgtatggaatgaggtggacaaagagacgttcaagaagcgcctgcaaggtccactcgaagaagtgcttggtatgaagttctccgaagagcttatcttctctatgcacgacttctcagacatcatccttaagcgacgtcggaaatggcttagccgtgacgatatgtttgacctgtttggcaaggaagagtgtctactccagctgctgaggcttgaacacttcggaaagaatgctcacgttactctgatcgatgacgtggtcgatcacaacatggaattcaccaaaggcgctgctaaggtgcgtttcatcaatgtagatgatccaatgttcaagcattggaatatcaatgaaactgtccatgactatggcagttggagagaatgatggaagaacttgctcctcagaaaggcaatatgcctgacagcttcatcctcgttcgtacatctgcaggcgttcatgtgcttggtggttggagcggtggctatctctacggcgatagctggcgtctcagcactgcattgaagcgcgtggtagagttcgatggtgattgggtagttgttgaaacaagatcaggttcgacctatgtcctaccgacacaagcagccattcgccgttatactttgactgtgacgacttcgggcgtgttcaactcgttcgaccgtcaggcaaaggaacaaggaatcctctttgaagcgattccggaatccgaattcaacgatgtaatcaaccaactggaaaattgatcatgagcaatgctaagctgcaacgtctggaagaagagctgtatgaaaagctgcgtgagattcaggatgtcgctgtagagacgaacaccccgttctctttctccatcaactaccatacctatgatgtgttcctcccggatcatgaagatgaagacatggtagaatatctgaaggaagaagttggtgttgaagttggtgattgggtcagctctagcgatcgttgctaatgagcattgacactgacctctatgagttggtggaaggtagaccagacgcagcttccatgctcgtctgggctgcatcactgctcgggctaaacgccgttcctgattccgaagaagttgaagctgcaattggtatctttgaggatgctcgagagcatatcatcgagaaacgtgctaaggatcgtttgaccgatatcgttcgctacattgtcccttctcagtacgataaaaaatgggacaagcgcacgtcgaagcatcctgacattcctcgtaattggtggaatggtgctttcgtcaaatcgttcggatggaccaaagatagcttcattgtcgaagttagttcctacgtcggcaacaacgagtatgatggggcaacgattgagattcctcaacatctcgctgacgtaaagaacttcaattggaacctgcaagataagattcctcttattgacgcattcctaaaagcagccaaccgctaaatatcacgtaaggattgttaaccaaccggggagttggcaccgcttcgaaagcggtaggtgcccgaaagggcatggggatcgagacctcagcaatccgccaaacaatggacagtaaactagccggggagctagcgccgacttgaaatcggtaggcacgtaatggtgtggggatcgagacctctgctgtccgccaaacaaggaaagattatgagtcgtagtggaccgattgaagctgtagagtacagaggtgtcaagcctggtgatcgctgcattgtgatgaccacgtctactggacgttcgaagatgcacgcaggaacctaccttggtcaacgcaagggaaattgtgtcgtcgagcttgattatatcaagaccatctttgtgaatgctgaaggcaagcattacgattggaatgctgagtataagcaaaatccatatcccagagctcgttggaatactcccgagtatcatgcggaacaggaacgctacaacttgaagcagaaagagcttcgagctggttacgagtacaagaaggtcccgtctactcgtcgctcgactctgcagaacaacaatgtctatcctgcggatatggcactgaaagatttcaagctgtaaatagaacatatggacagtaatctggcttggtagtcagcaccgcttggaaagcggttggtaccgaaaggtatgggattcgatttctctgctgtccgccaaataaggcgaacgatgatttacgttgtatttgatgatacgtatcgcggtgcacacaaaccatttcattcaattgaggcaactcaagaggatgcagatagggtggtgcatgatttgagagaaacaagcacatcaacatgtgcaagaacactgatcaaatggaaggcatttgagtttggtcagacgtttgaactacctaagcccttatagcacagtggcagtgcacctcattggtaatgaggaggtcgtcggttcgatcccgactaagggcaccaaataaaggaaatggatatgactgatacgacaagcttcaccgctgttggcgaaggttaaaaatctgcgggtataattcagtctggtagaatgcttgcttgccatgcaagtcgtcgcgagttcgaatctcgctgcccgctccaagatgtcaaaagccagggctttaatcggtcctggctttttctttggttgaatagaaacagtctacctataggataaagcaatgaacagacacgacgtgaaagaccagctcgaagacctgtggttcgatgtgcgccattggttcaagaatctccgcctggaaatcgacacccgaatcaacccacgccagaagtggttgacgaaagaaatcggtcgccgtttcgtcgacaaagactacatcatcgagacgaccatcttcgaaagcatgatccacttctgggaagaggacgatggagaaaggtcgacccgctaccagttcgagcactacgaaggaccgtgtggtggcaaggcgctcaagcccgaagaccaagaagcctacgtatacctacgtaagctgtacgctgacctggacaagtgctaccgttgggctaagacgcgtaagggcttctgggcagactgctacaccaactacaagccggaaaacgagaaaaaactcgaagccgaagacacgtactatatgaacgaaatcatccgtctccgtaagcacatgtggacctaaatgtacggaatccctgaaaactaccggcgggtggcagaatctttctatcgcccgcatggttgcaccttagatttttctcaaaaggcattgctgcaagctttcgagaaagaaacctacggcgttgaccacgacatgtcgaagaacggctgggcttttggcaagaaagccttcgacatcactgtcgcaagttggcgcgaagatcttgcagaaggtcttttctgcaagtatgactacctccgagactatgaagaagattcgttcgagtatgatttcatctggaacgtgatcaagaatttttcttcggcaaggctgttcacttactgatcttgttctatccaggcatcctgcatatcataattgtgtagcacttatacacctttgaggaaatgataatgagcaacgaagtttgcgtgaagttcccggcgcacctggtgcagaccgtccacgacggctacctgtacgatcgtaattcgcgccagctgttctcgttcaagtctggcaagttgaagccgatcaagcaggtcggttgctaccaggcaaagaagtcgtacggtgaagatggttgggctgtctccgtcagtggtaagaagaagttcatggccaagaaggagctccagtctctgtatccgacggagtatcaggttccgtttgcatgagcttcgttatcctctactgggcaggtgtcatcgtcaccggtggtgcctgcattttcggactctaccagatttggaagacgaagacctacacgccaatcggtttcgagcatgatgcaccagcgacgctgggttctttccttctccggatcttcctggcaatgctcgccacctttgtaccaatcatcaatgcctcactcgccatcatgattgtattcttggcagcctacatcgcgatcgcggaaaagtttggtgacaggattctcaaagtccttcggagacctctgtgatagcagctttcatcatcttcatgcttttctatggcggtcctgccttgattgttggaattcccggattcctcaatgttcgggcgatgatcaaggacaaggtgttccgagactggatcgaccattacgaaaaacggacaactcgtggtgatgttctgggcagagcttcccttcttgttcttttgactttcctgccagttttcaacattggctttgcacttttcgttgtaatagggtggcttcacgctgcctggtacaaattcttcggtgaatggtcaaggacacctgtataatggaagcgattatctttctgattgtctacctcatttcgattccgtttcctgcctatatggcttggaaagaagttgatgaggtccgcacatcaaagcgaatcaaaggcatccataacttcttctatcgcgatgccacgcggtgggatttgatctggacaggcatatggtgtggctttgttgcgatgctgccactggtcaacactgcgctcaccattggtggagctttggtttggttctttgagaagctttgggcaaccaaattcattgcatggatgaaaactccgctatgagcatgaacacaattccaacggaactgatcgcggttccgaattacgatggctacttctggcatccgggcgaagagcagttgtactccctcaaggtgaccggaacgcttaagccgatgaagtatcatggtgcgagatatgtgccaaagctgtatcggcaaattcctgcatcgtattccgtatcgcgtgctggcaagaaatcaattctgaccaaggaaacgctgcggaaaatcacacaacagaaatacgaggtgccttatgaaagtcggagtcgcatctgatctccatctagattttgcggatatgaaccccgagttcttccagtggcgtggcgacctgctgcttctcgctggtgacctcggtgaggaagattatctgcggaagcatggtgctgagttcttcgatggcgtctccaagatggcggagcaggtcttcgtcatctcaggcaaccacgagttttacggctctgagctggatgtagcggaagaccacctggacgtctatctggagcagtggaagaacatcatcccgctccgaaatgaggtgaagtcgtttggtcaccttgacgtctttggtggcactctgtggactgattatcacggtagtcctatcgcggaaatggctgccttcatgggtttgaatgacttcaagcaaattcgcatcaagaaggcaggttaccgaaagatcactccgcgcgatatcctgatcgagcatatgaagggaaagaacaagctgctggacttccttgagaagcctagtggtggaatcaagttggtgatgacccatcatgcgccttcgatgcagtctgtgccgaaccgttttcgtgctgattacgatttgaacaaagcgtattgcaatcactttgatgcgctgatcgagtctttccctgatctcagttattgggttcacggtcatacgcacgattacatcaactatactatcggtcagacggaagtgatctgcaatccgcgcggctacccagctgagcgaccagcacatcttccgccatatcaaccaagggatattttgctatgaacatttttatggggtcctggtctgaccgtgaggatatgatcgcggatttctgccactatgatggcgaaggtcgcgagcgcgtcgaaaactatcttgatgacgctcagatcatccttgcatgttacgagagctctgggtacgaaggctccgctttcgtcctgttccgaaagtggggaaagtattacgaagtgaacggtagccactgttcctgctatggcctcgaaggacagttcgaacctgaggaaaccaccatcgaagccatcgcgcatcgtctggagcatgggaacttggggcgtgagtattcttacaccacgagtagctatactcagaatgttttcgcggatgaactggaagaagcaatcatgaggctggagaagatctaatgagcatcgttgaacaactcgctcacctctgcgtgtgggcaggcacggataactaccgttggaagatgaagcaggtcggctggaccggttggtccgtcgacggtctcaaggaaaagcctgccgccgaggaaggctacgagaaggagtaattatgggcggaaacgcttttgataaggcagaacgcctgacaccgcagttctacaaagatgtcgtagacgatatcaagtggctcctgcggaacatcatggggtatggctccggcttctctattccgcattctgtgcggaacaaggaaagctacggcgacgtcgatgttctggtggcaagctcgcagatgcaagctgcactcaaacagatgaagaacggcttcaatgtcgttggtgaaatctcaaatggttgcggctacaatctcctcgttcacactgatggacagtacgttcagatcgatttgaacaaaaccaaggatgaggacatggaatttgcgttccattacttctcttggaatgacctgggtaacctgattggacgtatcgcacatcgtcaaggtctgaaacatggtcacgacggtctgtggtatgtgcatcgtgatggtgaccatcagctgggtgagatcctgctgaccaaggactacgacactgcgctgtgtcatcttggctttgacgtcaacgatttccgtgcaggctttgattccttcgaacagatgtttgattgggtcgagcgttgcaagtatttcgagccgagcgcattccctcttgagcatcgtaaccatcaggctcgcgttcgtgatgcaaagaggaaggtgtacaacctgttccttgagcgactcgccttcgatggagactacgttccttcggacaaggaaaagcacctcgagcgccataaagacaaatggcctcacctgagaagcgagatcctcttcctgaattgtcagaatgctgttcgcaaggaagtcaaggctaagctcaacggtaacatcgttcgagagttgactggacttgatggaaaggagctaggtgagctgatgcagattgtgaagcggatgctacctgaggacaaggtatacagcatgttcccagctgagattgaggaagggatcatggaggcttttgaacgttacaaggtagagaagaatgcgactaattcttgattggactaatggcgagtatgatgacactcgcacctgggttgaaccggtagagtttgaatccaaggaagtcttctttgaaaagctcgaggctaagaagatcgagtacaaggaaaatcgtgacaagcagatctctgtccgtgagaaatatgtgcggaaagaaatcagctatgacgaatacttcgagcaactggacaagcttgactctgtgaatatcgtcgatgacaaggggcgcgagttcttccttggcgatatgatttacatgggtcactgggatccaatcactgtctacaccgttgatgaatggtacggagattgatatgaaagagaagtcgaaagataagctgaaatactacgctgtgtctgcaaagacggaatcgggtgatgactatctgttcctgctcaaggcaaagaatgctctggatgtagccaaccagttctcggtagctatggatgaagagctcggctacgtctactacaacgctgttgaagccgaagatcctgaggacgctaaggctgccaagaaggccatcaatcgtgcaatcgaaaatgcagagattgactgaggcactcaaagaatttgcctatgatatgctctatggtgttggatgcatcatagagcttctcatcgactgtgcaattggtatctgggaagactgcgtacgcaaagggtaaatactgtggatacatcacacaggacattttccaatgccactaagtttcttccccgatgccgttcctaccgcgatcggctgggcacatccactgaccggcgaacagctgacggcaggtgctattccagcatctcagcttgatggcgataccccggttgatttctacaagccaaatgccaaggccaagtctttccttgacccagctggttcaacacgtaacctgatcaaccatgttgctcacggaaagcgagttgagtttgcagttcactccctcgacaagattgcctcagtggcatggacgttcgggggtgcagctgttgctagcgtgaatgttaccgcaggtggttctggctataccagcgcgcctaccgtaacctttgcagcaccgcctgcaggaggtgtgcgtgctaccggtactgcggttctaactggagcagccgtcactggtgttacgatcacgaacccaggttctggctacactgctgcaccagcaattacgtttgcgggtggtgaaggtacaggtgctgcggctactgctgttcttgctgccaacgcagctgttacaggtggagctgtccagcagaaggtcttccctgcaggtactcacagtgtcaaggctgttgtttcgtatgtcggtggcaccccagccaacgtcacgttgaacacttcggtcaccgtagcctaatagaaagaacccgtagcggcgaaagcttctacgggtttttctttggtgttgtttcgtcattgatgttatatcatatagtcatgaacacattctttatttctgatacgcacttcacccacggaaatctgatgaagcattaccctaatgggcgtaatcgtttcgcagacgtggatgaactcgatgaacacatgatcaccgagtggaatgctcgcattggtcgaaaggaccgcgtgtatcacgttggtgacttcggcggatgggacattgaaaagtccaccaaggttcttcgtcgcctcaatggccagaagttcttggttccgggcaaccacgacaagaagcacatcaaggacgagaagttccgttctcagtggtcgatgatctatccctattcgtatgctgagatcagttgcgaaggtcagccgattgtgctgtgtcacttcccaatctgggaatggatgcagattcatcgaggctggtggcatattcatggacacgtccacggcaagccgactggtattcctggcaagattctcgacgttggagtcgatggccacaacctgttaccatggtcgtgggaagaagtagttgaacacatggcaaaccgcccaacaaggacacatcatgagcactgaaatcgaactgctgtttgaaaagcttgaccagatgggcatgcgcctgggtggtctcactctgggtgacaatcctgaaaatgctgagaaggtagctcgcgaactgcgactgagcctggaacgtcttgaggatgttggtctcgaagaaattaccgacttcgactgcacaggcgaaccgactcaggaaaagattgatcgtgaccggcgtgctcttgctcgtatgcagaagcgagctgacgacatcaaggccaagacccgcgatctcaagcgtgagctgggcgaggacctgatgaaatatgctgaagaaaatcttcgcccctattcctatggcaaggcaggcattgaagatgctgtagacaaaatcgtcaacactgccaacctcaatgattacgattatgaggaaggctatagtggtttctggcttccttccaacttcggctgctaaaggagaattaaatgccttactcgattcctatgtatgaaagtgaacgcggttggggttccaagattgatggctatgctggtccgtttccaacctacgaggaggccaaggatttcaagaaggcctacaatcgtaagtacaataacgaagcccgtgctcctgactactacatcatggcaatggatccggtagaaaccacaccgactatgaagcatgactaccgatcaactgtctgagcatgtcgtactagacaaagcttggttcaatcggttagttgagttcatcggtcctggcgccctcacctacatggcaagaaacatgcctgagggcgtcgttaccgtcccattggatattgatctatcgaaagttagatcatagtctaagcaactgtggacaccgactttctgattcctgtataatgctttggtagcacgattcattaaaagaaacttcaaatagaaagaaaaagtagaaggcatgaaaacaatcgaaaagcagtttagaaaactgtcagaggtggaacacgttctgcttcgtcctggtcggtacatcgggagcattacgtcccacacttctgtggaacattgtccgacttcgggaaagatggagcagcgtgagctgactttcaatcctggattcctcaagctgttcgacgaagttgtctctaactctgtcgatcattcgaagcgaccggaaggcaagaatctcgataccatcaaggttgatatcgatcactccaccggtgagatctctatctacgacaatggtggtattcctgtcatcaagcacaaggaatacaatcagtacgttcctgagatgatcttcgagcttcgttcgggtagcaacttcaatgatgctgacgagtcgatgctcactggtcagaatggtgaaggtgcagcactgacgaacatcttcagcaagaagttcactgttgagacttgtgacggcaagtacaagttcaagatggagttctcggacaactctcagactcgctcgacacctgtggttcgaccaggctcgggtggcttcacaaagatcacctatcagcctgactttgaaaagctgggcatgaagggtattgatgaagggaacattgcagttctcgtcaatcgtgtctatgaaattgcagctacgaattctcacctcaaggtgtatctcaatggtagtcgcatcacgttgaagtccttcaaggattacatcgagatgttcacacctgagtatgcctatgacgaaaacgaacactggaagatcggtattgccagtgctgaggatgggttcgctcatatctcgttcgtcaatggtactcgcacaaagactggtggtagccatatcgactatgtggccaatcagatttgtacggaacttcgtgctcatatcaagaagaagcacaagatcgatgtcaagccttcggagttgaagcagcacttccgactgttcattgatgctcagatcgtcaatcctcgctattcgtctcagacgaaggaagacctgatcactgaggtgaaggacttcaagactagctggaccattgatcagaagttcgtcaacaagatcatcaagtcgacgatcattcagtcggtgcttgattgggcggctgcaaaggctcatcaagaagagatgcgcgagctccgtaagctcaacaaggcaacggacaaggctaacctcaagcatattgcgaagttcaacgatgcgactgaaaagaagaatcgtcatttgacttcgctgttcctggctgagggtgattcggcagccggtcctctgcgcggcgctcgtaatccgaagctgcatggcatctttgctctgcgtggtcgaccaatcaacgtgtcggcagcacctctggcaaaggtcaaggagaacgatcagttcgagaatgcacgaattgtcgttgggttgaagtacggagaagctccggacttgaacaatctaaacttcggacgtatcattgtggcatcggacgctgaccagttcggtcactccattgctggtctggtagtaaacatgtactaccgactgtggccagaccttgtcaagaagggcaagatctatcgtctcgtcactcctgtggtcactgttgactacaagaagcaggatctcgaattcttctcgatggaggagtttgaggcatggcgtcttaagcatcagaacgagaaatacagctacaagttcttgaagggacttggctcttcgtctccgaagcagtggaagaagtacatggacaatctggatcgttatctggtgcagttcacgttcgacgactcggcaaaggaaacgatggacctctgtttcttgaaggaagctggtttcaccgacaaacgtaaggcatggttggatctggaatgagatttttcgaagacgatagcaattttgaaacgaccccggcgaatcagtcgggggtcaccaagctgcgagtgaaggacttcctcgatcgagacttcaaatcattctcggaatacgattgtcagatcaacattccgaacatgattgatggtttcaagatcagtcagcgcaaggcagcctatgtcatcaaccgaacgaacaaactcaacaccgttgagcgatattcggcacaggtggcatcggaaactgcataccatcatggtgcaggcaatctggaaggcgtcatcgttggtatggcgcagaacttcccgacctcgaacaatgtcaattggttcgttccagatggcacgttcggtaacatccttgaccacaaggcttcgtctggacgatacatctcggtcgaaggctcgcccaacttccgaaagtggttcagtaaggacgacgacctgatcctcgaatacgagtttgaggacggtgaacagattgagccgacgttcttcattcctaaggttccgacaattctgttcaatggttcgtcgggcattggtaccggttactcaagcacgattctgaactacaatcctgacgacgtcgtgcgcaatgtgctgcaggtcgtcaacggaaagaagcagaccaagctggttccttggtatcgtggttggactggtgatatctcgaaggctgatggacagacgactttccgtggcaagtttgagcgtgtcaacaccacgaccattctgatcactgagcttccggttggtgttgagcaggagaagtatcagtcgcacctgtcgaagcttattgataagggctggatcaaagactatgacgatgactcgacggaagaggctggttggaagatcactctctacacgactcgcgaatggctcaaggcacaaaccgacgaagacctgatggtcaagttgggtttgatctctcgtgagtctgagaacatcgttgtctgggatcacaagggcaagatcaagaccttcgacaatcctgagcagttggttgagtatttcgttgaggctcgtctggagttctacgagaagcgtcgtcagaagctgatcgaggcgacgtctgagaaaattcgttggctgagtgagcgcatgcgcttcattcttttctatctggacaactcggctaccttcaagaacttgaagaaggatgccttggtagatctgttgcagaaaaacaagtttgccgactacgatcgtctgttgcagatgcctatctggaacttgacgaaagataagatcgaagaactttcgaaggcaacggacaacgaaaagtctaccctggttgccctcgaaaaagatacggcgaaggacatgtacgttcgagagctgaaggaaatcaagtaggaacttgttctttctgcatcgaaacaatatcatagttttacggtaaccaaacaggactttgtgatgatgatcaggttggacggcgcgaaggttgcattgatctccgctgccgtcgctcgtgttgcaggtagtgaagcccacaagttcgtcattgacgagcatttgcgggcgatttcctctgccgttggcgccgaaggcgtctcggtgtatgacctgggcaagcggaacgaaaagactcgcttcattcgtttcgacttcccgcagggtgaacagatcgaaatcgaagtcggtccgcagcctgagttcgtgaaccatgacaatcgccccgaaggcgatgatgacaccccgggcggcacgcctgttgcgatgcggatggcagcatgatcgagatcatctttgggtgggcgcttcctgcgctcatccttctcatcgtaggtgggtacttcacctggaagaaagcgaaggaagacattctgtactacgactgtcttactcgcgggacgctgctgagaatcccgttggttcttatcgccgctgcgtttccgggcatcaactgggtggctatcctcttcatcgtagcctgggcactcgctgtgtatgaacgccaaatctctgacttcttcagagagcctgtctgcggaaggaagaaatgagcatctttctgttcgcactctgggcattcggaagtctcttctgtctcgcctacctgaccagcgtagctaaagaccacatcaagcactacgatttgacggttggcgacctgggcttcttcggagtgatgtgcttgttggcggtcatcccggtgtttaacttgctggcaggattcgttatctttgccgagtgggttgaggtcaccttcggacccaaggcaaagcgcatcgtcgatttcatctccaaccacccgatatgggacaaggtaatctttgtctcgaaagaatccaacaagaggtaataccgaaatggctgtgaaagaaaagaaggacaccaagacctacgttggtgcacgcatctccaccaagcagttcaagcgctacctggccactgctccgacgccggaagcgaagcgcgccatcaagtctctgtacctgagcgagccggtcaagttctacagcaaggctgacctggctgctgagaacgaaggtgtcgaaaccgacctgccggtcaaggcgaagtaagaaatggccatctccaagaagcgcatcgctttctggactgtggcactggccttcggggtagcaatttcgctacccccgggcgccaacgcagaacagccgacccagccgaagccggttccgtcgtatgtccaggccaacgtgaatcagttcaagttcacgcagattcctgatccgtcgaccaagggcgagacttcggtcatccgtttcgtcgactacgaactgcgcaaggtatgctacatccagaagatgtatgtctaccatggtggcggtccggcaatgagctgcctgccgctatgaagaagattcttctcgcagttgcgctgatgatgcctctgtctgcaatggcacagaacatcatcatggatacgaacactcagatgctgacccagtcgatgatggcgtctgcaaatgagccgagccgaccgaagccgacggcgcacaccttctacaaagagcgcgtgccaggcaagcccgaagaaggtttcatcccggtcacaagaaatgcacctgctgtaaactatgtgcaggataaggtaagggtcgaaggcaagacgatctacatgctggatgataggactaagggcatcaagtgctacttcatcacctatttcagcgtgcgtgaacctgcaatctcctgtgtgaagtactaactcaactctggaaaatatatcatgaaccgtgaacgtctgatctacatcgctgagtggctggaagctggcgctccgcataagggcaaagtgaagggcttcgacatttccgtcggtgtgcaggcgctcaagagcgatgcgccttcctgtggtaccacctgctgcattgccggtgcggctacgcagttcttcaacgacgaagatggcgagctggccaacgccgcttttggcttcagcgagtggcaggaagatgatgccaccaatgaagccgagtgggatgcggtcttctatgaagcgcaggacctgctggagctggatcataagaccgcagtcgaccttttcattccggtcggtgcaaccggtatctacgctgaaggcaccaactggtcggatttcaacgacccctacaagaccgcacgcgtcatccgcaatctgctggagaccggtaaggtcgactggagcatcgaataatgaaggcaactctgaccatcggtgtgtctgcctcgggcaagaccacctgggcgctgtctcagccgggtgaagtgctgagccgcgacaactaccgttggtccatcatggaagagaagggcatctcgccttcctggaccaactggaagtggaagtgggaaaatctggtcactgaacgcgttgatgccgacctggcactgtgcgcggctcagggtaaggatatcatcatcgccgatacgaacttgaacgagaacgttcgtggcgcgatggctgccaagctggaagctctgggttacaccgtcgaatacaagttcttcgatgtgacttgggatgaagctgttcgtcgcgacaacgagcgtgcgcatggtgtcggctattctgttctgcagaagcagcatcagcagttcctggacaaccatgttggtcgtctcgccgcagacgctgacaaggggactcgtaaggctgccatcgtcgacattgatggaaccgtggctctgatggaaggcgttcgtggaccgttcgagtggcacaaggtgcacctggacaagccgcatactccgatcatcgatatggtcaagggtctgatggcagctgggtacttcatcctgttcacctctggtcgcagtgatgagtgcttcgacctgaccgagaactggctgcagagcgtcttcgcccctgatggctactggcacggcgactgtcgtttgctgatgcgcgaagcttcggatcagcgtaaggacacgatcgtgaaggaagagatctacatgcgccatatccactacaactacgacgtgcagatcgttctggatgaccgtccgagcgtgtgccgtatgtggcgtgacctgggtctgaacgtcgtgcaggtcggcaatccctacatcgagttctaagatgacggacgccgaaatctataaggcggtaatggcggagctcaaggcagctccgttcattacaaccaatcatgcactcacgacaacgaaatttgcaacgttcaaattcaagaagcgttcgagtgggtactacctcaacgttgacttgcattcatggccttcggagcacgagcgagtacgcaaagaattcaactcatggctttataagaagctgaaaccctatggttgggttccctacaccacttccggtggctgtggcgagtggacctaccgacttgatggaggaatagaattttgacttcggaccttaaaatcgaatcaatcaaaaccgtttactctgctctgaacattcctttcccggaaggtcaggatactcacctatatggtgtgctgaatgatctctgggaaacggctactacgaccgttgacgtcgaagcagtaaggcagcagtcttggcaggaaggatatgatgacgcacgcgaagatcatgcgtgggacagttcaagctgttgattgacctatccaggtcaaagatgtagactgtgagtgtggtagcggtaacactttattattggagtacgtgatttagatggcacacgaaattactgaacgtgcagacggcacgagtgaaatggcgtttaccggtcctcgcagcgcagtttggcacggacttggtcagcaggttgatgaaaatgcttccttcgatgattggaagcgcatggcaggtttggattgggaagtacacgaatccaccgtcgattacaccgcagtgagtgcaaagggtaagcctgagaagcattcgattccggacaagcgagttctgttccgttcggacaacaaggaagctctgggtattgtctcgaatgacttcaagatcgtgcagcctgatcaggtcattgagttcttccgagaccttgttgaactgcatggcttcaaactgagtactgctggatcgctcttcggtggtcgtcgtttctgggcacttgcagatgttggcaagagcgagaacgttatcgacaaggatcagattgacggacatctactgctgacaacggctgtggatggaacgatgtcgacccaagcgcgtttcacctcaacccgagtggtttgcaacaacactctgacgattgctctgcaaggtgcaagctctcgccctgtaattcgtgtgactcataagaaggactttgatccgactcaggtcaagatcgatctcaagctcatcgacaagggctgggctgacttcatgaccaatatgcggaagctggcaaacaagaagatgtctgctcgtcagactcgagagttcttcgaagagcagctgtacaatccagaacgtcgtgcagacgaacagacctggggcgtgaaccgcgaagtgacgcgtttgaccgatctggctctgggtggtagtgggtccggttactccaagggcacggcgtacggtacgctgtgtgcgattacggagcactttacacacggttccggcaagcgtgatccatctcgacagttctgggatgcttatgtcggtcatggtgactcgaagaagcaagacatgtatcgcaatctgttgaaggttgcagcctaaggagaaagtagtgagcgaagtaaagaaagtatcggtgaagattggcattccgttcctgcctcttttggcaattttgttcatcgggcttaagatgagcggaattggtgtcgtcgcaggatggtcttggtggtgggtaacgtcgccgctgtgggttcctgtagcacttgtgctgggtatctggggtctgatcattggcctgggtgcaacggttgttgttggttcctatctctatcgtaaagccaaaggaaagaagtaatccatgaagaagttctttgtagcaattctgatggctgctgttctggccaccactggttgttctgtggtttcgcctgatcctggtcaggaagctgttctggtcgccaagccaatgatcttcggcaccggtggcgtgctggatgaaaccgtcaagcctggacgcgagtttgtggcattgaccacagatgcgatctatgtggacgtcactccgcagaacatccctgtgaacttcgacgacctgtctagcaaggacaacatccttctggacttcgagacgaacatccaactgcaggtcaggaacgcatctcagctctacaagaccaagggtcctgaatggttcaagaacaacatccaggctaactaccgagccattgttcgcgatgctgtcaagaccaaggacatgaatgagctgatgtctggccaaaagacggctcaggaagtcgatgccgacgtgactgagaagctggttgcactggtcaaggaaaagctgggtgacaacgttgtggtgatggatgtctctctgggacgtgctaagcccaacccggatgttctgcagcagatgaacctgacggctgccgagcagcagcgtgccaagacgatggtgcaggcagaattggctgaacaggctcgaaagcagcaacagattgctaaggcagacgcagacaacgcatatcgagacaagatgtttctttctccagagcagtaccttcgtctccagattgccaacatccaagccgatgcctgtaaggcaagcaagagctgtatcgtagcgccgcctggcacttcggtgctcgtgcagtaagaaaactttctgcaagtaggagaagccacagaaatgtggcttttcttgcgtcaatcgagaactttctggcctacgaaaaggttgttccagaagtgcctgatctgtagactgtgtgagtggtaaacagttccgaaaaacaaatcactccaagaggttccgaaatgtctgagtatgtcgtcgttccgcaggtcaagggtctttcgaaggtgccggcttatgttggcaaccgtgtcgatggctaccagactgtctacctgaccgtcggaaccaaggtgaccaacgtctcgaagttcccctatgaactgaagaagttctacggcacgatcgacggcgtggtccacgtcctctggaaggactcgatcaagcgcgctccgcgtgtcaagaagggagaagaatgaaccgctggtgcaggttcttcgccaccctcggtctcggtctggccattgcaggcggattgactggatgcttcgagcattcgccgccacaagaagccagctatacccagaacggcattcaggttgagaagctgttcgtcaaggacggatgcacggtttaccgattccttgacggcaacattcgctacgtctactacgcagactgctcgcattcagcgtcggtggcatacgaagagaattgcggcaagagctgcacccgacccgtcgtgaacacttcatccaaggaacagtgatgcgaacctaccataaagacggcacccaggcagcaccggacgagattttcgtcttcggcagtaacctcgccggtcggcatggtgcaggtgcagcaaaagccgccctacagcactacggtgcgaagtacggcgaaggcatcggcgagcagggtcggtcgtacgcaattccgaccaaggatgaacacatccagaccctgccgatcgaactgatcaagccgcacatcgacgaattcattcgtcaggctggtcacctcttcaacacccgaaagtatttcgttactcgaatcggttgtggcctcgcaggctataccgacgagcagatcgctcctctgttccgcgaagcgccgtacagcaatatgagcttcccggaagagtggaaaccctatctcgaggactgagaactgttatgcagaagttgatgcgcgaaggaatcatcattgacaccaagcgtcggcaggagggcaatctctccatccaggttccgcctgtgccgtcagctgaagaacgttacggtgactactgcgccaaactggcagcacgtggtttgaccccgaaggtaaacagcttcccctgggcgtggaagggcaagaagaagcccaagacgttcctcagcaagaagcctaagatgcgcaagcgtcgcatggagacggtaccggtatgaacaaagaagaaatcatccagaagttggggcgggcagctgcaattgatatcatcctgcagcgcgaactgaccgaagagcaactccagctcgttctcgaggttatcgaaatctcgatggacctggcggaggcgaataccctcaaggcagttgaactccggaacgcagcgcaatgatcgagcacaagaaagatatcttcttcaaaggcatcatgatctttgcggtcatggtgtgtcattctgaccaagagacatatactgaaggcatggtgcaccgcgacggttatatggctgcggctcggaagttctacgagcacttcggctacatgactgccaaggaaacccgtgacctgttcggcactgacactccggtctggcctgaatggatgacggaagttttcatggaagtggagcgccgagttttcgacaccaccatctgggacaagtgatgaaccagcaagaagctcttgagaaattgatcgacgccgctgaccatgcctacaaggtcttcctgagtctggcagatcgcggtgaatatccgcaggagcttctgccttgggacggcgaaggcaaagacagtccgttgttcatgggccaccaaggtctgatgttcttgatcaacgcgatcaaggatgctaaggctgtaaagcagcctcaggctttcgttgcagacatgaagacttccgccggcatggaatactatgtcatgttgggcacacctgagcggaacgattcgctcttcatgttcaagagtcgcagccgtgcagagttcaccgctgccgaagtcaactattcactgggcattggcccgcagcccgacgtactggattacgaagaatgagattcgatatcaccactcgccagccctacagctaccgaacccgaaaggtaggtttcttctgggatacctacgacatcgtctacgatgaaactgtgattcgcgaagtgaaagacgagagtcttgcgcgagaagtggtcgtgcttctcaactgtgcctatcgcgagggtcacatccaagctcagatggaggcgatggtcgatgcatattgatcttgacaagccgatgactgagctcaccgtacgagaatacgcctggctgttagcatggcaggctaagcaagtgacgggaatgcctacaggtgaaagggtgcggtggatggcagatgtggcgatcgcagacctggaagattctatcgaaaaagagatgaaataatggacacgaccttctatcaagaagctatcgacgcacttggcaacaccgagccggaaggcttcgatggttgctcaggcgttggtttcatcgacggttgtaagaggatgggctgccacaacgaagctgacgaggccaagttggttgccttccgaaaggcagcaatcgagcaaaaattcgtaggctgagaaagccaaacaccgctgtataatgcttcgacacactttgaaaaggtaattgatcatgacctacgccgcacaagctgctaccgaactgctggacgctctgcatcacgctcacctgctggaaactcgtcagcgagtttacgagtcgattgctgatctgcgctatgcagcacgccacgaagtcgaagtgatgctgccgactctgaaggctgagatcaagcgcatcggcaaggcgctggaagatgctcgcgagcgcgggctgaaccatggcgacgtgatctacgatgagctggttcgtaccatccgtgaagtgaaccacgctcgtgctcacaaccgtcagcgcatcaaggacctggcactggatcaggcaatcaacaaggctgctctggcagaactcaatcgtgagatttcctacttcgaggctgagggtctcgaactggaagtcgagcagatcatcaactaccactgaggaacaagacatgttcggatctcttctcaaggcagccgtaggcgttgccgtttcgcctatcaaggtagcagcagacgtcgtcaccctgggcggcgcgatcaccgaccgtcgtgagccgtacaccgtcactgctgttcgtgaagtcatggagaacctggaaaacgctaccaagccggatccgctgcggtgaccgcctctatctgggctagcaagccgcatcgcgaagacctctacgctgactgtctcgaccactggggtgcacctgcccagaccgatatgctcgtcgaggaacttgctgagctgatcgtcgcggtgcagaagtacaccaagcggaaggccacctacgacaacttcgatcacatggctgaggaaatggctgatgtgattttgatgatcgaagagatggcattccatttcaatcaggaaggtcacgcagaagcgaacaagccgtttaccgaaatggtcgcgggttggatggctttcaagtgcaatcgaactgagcagcgtctggcagaatccatcgcacgtcggtatccggaaatcgaatgaacgcactcatggtgacatatttcgtcgagaacggtatgggctacctctttgagcagccctccgagatcgctcgtcctttggcttgctcaatgacaggcaagccgatggcatggcctttcagggtggtcaagagctttgtccgagacgacgaatatgtccctgtgcttctgcaagaggcagcaaacgcatgatcaatcgatataagctcgacgtcctgctgacggatgaagaggaagacaagctctgggaaatgaagaagaacaacgacccgctttatggtcgtcgtatcagcgaatatttccatgtggttgaacacaatcggggaatgcagtttgccattgatcgtctcaacgaagcctacgccaacgactttgttgatgagtttggcattgacttcctggatggcagcgagtacgcgttcatcaccgacaaccatgacctggcatcggaactgattcgcatcctcgagctggacttcatctacgacttcaaggctgacgtcttcatctttgatatctgggcatgccacgaagcatggctgtcctatctgtacgagcgattcaagggtcgtgttcgcggaaacatgcgcgcgggtgatgtggcagaacggtatgtacgagaaggctatggcatctatcaatcgagccagtcttatcgtatcatgatcggcgagaatgttgctattccgtcgttcctgagccaattcaagagccgcttcctgagaatctgaaatgaaccttatccactgggctgaccaacacctcgactaccgatgctccttcatgccaacgatgctcaacatcaatggcgaaactgagactgttacagttcgactgaagagtcggcagttgtgtcaagggtcgagaatggtaaccattgtgcgagagtccggtgaggttattgaagtgtacctggatgcccttgagccgatgaccgaaagcctgtattattttgatacgcctgacggactatctggttcacttcttattccatttcctcaggaaaccgacgacggctgctaacggagaacactttgacaatttctgcaaaaatcattgccgactcgatcgacccgaacggtcgtcgaatcacaacctacgaactggaatacccacgcttcatccattcggagttcatgacccatcgtctgttctctcgcaatgctgcatcgagccgtgcaattccgatcgacaaggcaattcgtctgatcctggaagacaccgctgcaccgagccattggggcaagaatcagccaggcatgtctgcaaaggaagagcaagatgagcctatccagctgaccaagggaacgcgctattcgattagccgacttggcgcctggaattgggcacgtgaccgcgctgttgaagctgcgactgccttcgctgatgccaagtatcacaagcagatcatcaaccgtttgctcgaaccgttctctcacatcaaggtcgttgtgactgcaactgagtacgacaatttcttctggctgcgaaaccatgctgatgctcagcctgagatcaagattctcgctgagaagatgctcgaggctcgctcaaaatccttcccgaagctgctgcgcccaggagactggcacgttccttactacaaaggcggtcattggtttgcaagtggatatgctcgtggcaaggaactcgaggaagtcgatgacaagcgcggcggaagcactctgaaggaagcactggctatctcttcgtcttgctgtgctcaggtgtcgtatcgtgtgctggatgactcgcttgaaaaggctcaggacatcttccgtcgtctgattgatgcaaagccggttcatgcttcgccgtttgagcatcaggcaaccccgatgaaaactctgtacgatgagactgaaggtcctgtctacaactgggatgaaggtgtaactcacattgaccgctacaacaatggttggtcaggaaatttccgtggctggattcagcatcgccagctgatcgaagacaacgtctgttgggactatcatgagcatcagtagtggaactatcgtcgtagaaacacctgagtctatccgttgggaccgaaccatccgcaattggcgatggtggacagtcattccgatggtgttgcctgcagcactgatcatgttcgtcctctatccgctgcactatgttctgtggccaatcggacaatggatctgtaccctgtccaacaagctatactacttcaagcctccgaagtgggtcaagcgattaatggattgggcgatgaagaaatatccggaggaaacagatgaagagcattgaaggcaagtacactctacccaacggcgaagttcttgatgtgcatctgaacatcagcgttggagtcaacacctgggtcgatggcgcatggtgtggcttcaacgaagtgtctcccgaagacttcgcattctgcatggaagagatggcgaaggaaggaaagatcatttttgagcccaagcataatggaaatccagacagtaattgacgacatgaaagcaatggcatctaaatgggatgccattggcgcaggcttccaggcaattccgattcatacgtggatcggaatgcttgagcagtatcagaagaaacagaatccgcctgaacctcctaccgagcagaagattgatgactggcatctgcctatcgtaggttcggacacctgcctgactatcaaaggtcagagtcgttggttccgttgcacagctgacgattgcggtgcgaacgtcttctctaagacgcgtgatccgaattactatgtctgcaatggttgcaactctggctacgaaacgagcaagggactatgaaaaagattacttcacacaaggaagtcaggtgtaagactcctcaggaactgtctgacctgattgctagccttgctggctctgaatggtcactagcagcattcccttctacctttcttgatggcactgctcaagtttcactcgtgaagatcgatcttgttgaatacaagttctcagacaccgagatgctcgactggatggaacggaacgaggcggtctttagcagcacccacgacaacaccttcatggtttctatgcggctgcgcgaaagcaagaagtatggagctctagcgtgtggtctaactgctcgtgcagctatggagaaggccatgatcaacatcaaaggtcaccaataccttttcgaggatgagagatgatatatcaagatgcaagtggctttgttcatcaaactgcaagtatgaccgagctgctcaacctgcgtgaactgatcaatcttcggattgaagagaagcgcaatgaggacaggactcagatttggcgagcctatgacgatgcaatgaccattggttttgctacgaatgagcaactacctcagctcctgaaatggatctcagaacgtgctgagcatatctccgaaaagctcgttgttgagcagtatttctgtgtcaactctgaggttgaggattggcttggtagaggttggttcctctaatggcagtctacgtcgatagcatgagagcgcaatatggcagaatgatcatgtgtcacatgctagccgacactgatgaagagttgcatgccatggcagacgcgattggcgtgcaacgaaagtggcatcagaaagctggcaccgtccatagccactacgacattgctctttcgaagagagcattggcggtccagcacggcgctgtcgaggtagatcttcgtcaggttgcctatataatacgtggtaaacgccaacgcctaaaaggtgacacaccatgaagaagtttctgatcgcactgatgctggttctttcgttgggtggctgtgtgagccgcgaagagtacatcgcagaacaagaaagcaaaaccacgaacgaccagtgcctgcgaaatcagattttccagcagtgtctggcaaccattccgccgggaccgcagaagactgtctacaacgactggaacgaagttgtctcggagtgctcatctgttgcctactatcagtcgctccgtgttcgtagccaggtgaagccagaatgtcgagcacaatgagagacatccaatccgaagggcgcatcgagaaggcagcacgatacaagtgcgaacttctcggtcttgatccagatgaagcgctctggctcgaagatggtcggagcaagaaggaaaagcgttggatgcgagttgcgcgtgagatcgaaaacttccgactcaacctgcaaattgtatcaatgttccttggcgacgaagtgaccagtcctgtatcataagtaatgtagattcacatcgaggcatgttcaatgagtaagcgtttcgtttcaacaaaagaatacaaggagttggctccggttgcatatcgccagtggcgcgaccaaggcaactgtaatctgatccacggctacgcgctgtcgttctatttcgagttcgagtcggacaatctggactctcgtaactgggttgttgactacggcggtctgcgtccgctgaaggacttcctggaagagtacttcgaccactgctatctcctggcacaagatgagccgcactatgatgcgatcaagaagctgggtgacctggggctgatgaagatcaccgaagtcgaagcaactggctgcgaagcgattgcagacttcctttacaagtacatcaacaccggcttccttcgcgagatcggtgcacctgcagacgtttggtgtcgttgtgttcaagtccgtgagacggaaaagaacatggcgatgcgacttggtcatcaagaggacaacgaagacctgaccgtcgacctgtctaaatatcgcagagacggctgatcacggtgtaggcaatggcatcacaacccgcgcatccagagcaacgtaagatccttacgaagttctgtgaacaagaacttgtacgtcagcgggactatctgatcaagaagtataagctgagagactacaatcctcagcttttcttcaattggaaaaggaatgcagtccacagttggggcggatcactcgaggatgatataccattcctcatgctgatgcctcatgagatttggcagcacgtcggcaagacaggaaagtacatcttcaatgagtacgagttcctgcatgacaagcctggcatcggaatgggcagggcgaactggaagcagcacatctcatggactatggctcacgaattggctcacaccatttgtgagattgagcgcttcgcaaagaaagctaagaaagtcttcccgggacagactgcaactgagcatgatggtcatggacccttgtggcagtccgtctattatgatctccgtgtacatcactgccgcgaggaattctatcctgttgaggagatcgacttctcaaacgaggtccactactcgcatcacagggaaaagggtgagcaccgctttgtcttctacaaggggaacaagccattcgcatggtttgtccgcactgacggggtcttctggcagaccacgtcccgctggcggaaagcgggcagggccagaaacggggccagaacccctcgagaactgaccagaaatctccagaattcgtgactttttgtcctgagagttgtaagtgtctgattcgtaaggttgtcctcaggacagaaagaacttaatatgtggttgtgggacaaacactcctcaacaaacacaaaggacacgaagatgagcaagttgaccaagacccagaatgaagccgtcgccggtgccgtgaaggcagtcactggcttcaagatgggagcggagacttccggggtgcagcatgtggaagccggcaacatcaccagccgcagcggtcgtaagtggaagaccagcatcgccttcaccaacgacggcggcaagctcaaggcggacctgaccttctccgaagtcggcgccaagaccgagaccacctactccagcgagaacgctgccggcgagaagctgcgcgaattcatcaagtaccgtggtcgccgcctctgcctgaagggcgcggacatccagcgcatccttcgcttcttcaactccatcgtcccgaccggcgaagccgcgaagccggcgaccaagaagacgaccaaggctaccaaggctaccaagccgaaggctaccaccgaagccgtcgccgaaaccgccgaagcctgagccctacggggcggcgcaagtcgccccacctttcggagaacgaacaatgccccgtcgtatcagtctactcccgcagcaggcactggatttcgctcagctcccgatgatcgtctcaggcgatgacgagctggtcgagaaggctctcctggtaaagaagagcgatctacctggcgcctacgcatacgtcacagtcaccatggtgacgcgtgttgcggggaagaccgaggacatccgggtctgcgttcgtaaggaagtcgaataatgaagatcgtgatccaagtcctcgatggtggctggcaggaccagtccgaacatgacaccatcgaggacgcagagaagatgatggacgtggtacagggaggcgatcccgatgcctacgtccgtatggtgcagttcgttccgcgcttcttcgctgagtaccagaagcctctccagctgggcagtgacaggacctacacgcacattctctacgtagccgagtaccctgcggacaggagcatcaagtcctgcaaggcgcacttccggtctcaggttcgcaagttgcctgagttcaatgatccgacgttcaaaatccgtcacgagtacgtcaaccctctgtcgtattgaggtaacctggagatcgtcatgaacatcttcgtcacgcacctgagtccggttctagctgcacggaacttggacaacctgcgtctgaacaagatggtggtcgaaaccgcgcagttactctgcaccgcgcatcacatgaaacaaggcagccgggctaaggttctctacaagcccacgcacaagaatcacccctgcgccatctgggttcgccagagcaacggcaactacaattgggcatatcgtcacttcgcggctctggctgcagaatttgaaagccgcaacggcaaagtccacaagacctgggcagatttgaaggacgtgctcgagaacgccccgaagggcatcaaggacgtcgtccgcactccgttcccgaactgcacgccacacaaggacatggagctgatcgaagcctaccgcctgaccatgaccgagaagtggcaagcggatgtcgaagctggtcgcacgccaaagtggggtgagagattgacaccaccgttctgatcgaacgccaactagaaactttctaaaagcgccagagcgaaagcctggcgcttgacctatctatggtgcccgcatatcataacggtatggagacattattgtggttggcagttacattcttggggccacttgtactggccttcccgccagcattgaagaggctggtgaactactaccgttggtcgaaaactgtctatgttgaggacctgattggatatctcttccgaaccctttggccaactctgatcccggctattggatggttcgttatgccaggactctacttcgaagagttcgttgaaccgattctcaaaatcaagctcaagggttgatcatgtggccattcagtagtcgcaaggatgcacaaattcgttctcttcatctggacctggcaaagaaagaaggtgagttgtccaaagcactgaaatcacatctcgaaactctcgacaagtacgagaagggactcaactcccagatcgcgctgcttgaagtggtgagccggtggtccagacaactagaccgagataagagcatgagtgagactgatcaaggcttgttgaaagttgtactggaagatttctccaaggcaatatctgagcattgtcagcacaagaaatgggtcaagactgatcgacccgatccaatgttcccaggcgactggtatcaccagtgtgaagtctgtggcaaattcgactatgaggtctaaggaagaaatatgcgtaagctcgtaaccctgcgtactgtcgcagaaattgttcccatcgaaggcgcggatgccattgaagtggcggtcgtcgacggctggagctgtgtggtcaagaagggtgaattcaaggaaggcgataaggccatctatttcgagatcgattcgatcctgccatacggtgacgaacgttttgccttcttgatggcccgtggctgcaagatgcagccgactgaggatggtggtctgctcgaaggtcatcgcctgcgcactatcaagctgcgcggtcaggtgtctcagggtcttctgatcaagcccgacgatgctttctctgacccgactctctaccttcgtggtatcaatgtcgccgaaggtccgttccttgactaccggcattcggttgaaggcgaactgaagcgcatctacttcaacgacgaagagaacaatgacctgtcggatgtcttcggcgtcaagaagtatgagaagcctatcccggcacagctcgcaggaatgattgcaggcaactaccctgtgtggctgccgaaaacggatcaggatcgaattcagaactgcttcggtcgtgcgcctgaaggcaagtaccatgccgaagagaagttcgaaggttcctcaatgaccatctaccatgatggtgagaagcttggtgtgaccagccgaaacctggacctcaagctggaacaggaaggcaacaccttcatcgacgtcgccaaggcaagtggcatctttgatgcactcactgcgtggattgctcgcttcaatcaggatgacttcattcctcgcattgctattcgtggcgagctgatcggtcctggcgttcagggcaacatctatggactgacggcacatcgtttcatgatctacgatgtctttgctcatgaccattacctgacgcctctgggtcgacatgtcttcctggaagagttcatcaagccgttcgcaggaaagaatgtaggctatgtccatactctgttcacgatgactcgaggcgaatacgctacgaaggaatcgtacaaggagttcctgggcaaggcaacaggcaagagcattcttgcggacacgctgcgcgagggaatcgtctacaagtcagacatccagcaccgcggtgacgtgttctcgttcaaggcgatcagccctgaatacctgctgggcgaaaaagaatgaacgagtttgtcgcctctctgatccttggtgtcatcggctttgtagtcggtggcatcattggcactatctggttcacaggattctttcctgctgcactgattggtctaatcgtcgggttctgcatcttgtggtgcccgtgtatcctaatgcatctggactgaaaccatggctgatatctttcaaagggaagtgatcgattcgttccgcggcgaccacgaattcctctctaacttctatcgtgagatgatggaatacgatggacatgtttgggcgactgcggaacacgcctaccaagcatcgaaatgtgccaaacaggatgagtatgatctgttcctgaatcctatgctcactgcaggtcaagcaaagcgcatgggtaggcatgtggacatctggaagaactgggaagcaatcaaaattggcgtgatgcaaaagatcatcgaagccaagtttgaggcgggtacggcactggcagccaagttgctcgcgaccggagatgcaatcctcatcgaaggcaatacctggggtgacaaattctggggacagtgcgacggtgaaggtcacaatcatctcggtatgattctcatgtaccataggggcaatctcaggctggagccataatggaaagctatgaaattatcaggctaatcaataacgaacggcaaaggctctgggaagaggacagtgcaaatgaagtcactgaccaatccattgttggtcagattagaactgacctgctgacacgggaagagtttgataggaactgtgcgcgatatgctgattgggcatactacacgccaccggatcgattcgttttccactactatgaggatggcgttgaggaagctcgcatttgtgagcgcctgatgctaggaatagaacgatatgtagtgtctggcgtcaacggtggccactatggaatctacgacacccgtgatgtaacgttctatctgaaaacaggtacatggattgaaattccatcagacgtgttctttgctcaggcagacgttgatgcggctcagaagaaactcgacgaagcaaaacagcgactcaaggatttaaaatgattgctattccacacgatatcatcactcacaagacttcctggcgcgccgctatcgaactggcgattgcgaattccccaccgagggattatgatcaagacgatgctgggtattggcgccatgagctccagcgcttcgatgaagcctatgcccagctggaagcgatggacctagttcttctaccttaagacaaaacgccaactcaaggagtttgaaatggcaattgaagtgatcggcaaagacccagcgcagtatcgtgagacgacctgtaggaattgtgcttcgattcttcgtttcgttcttgctgacgtacagaagaagcaggtgagcgattacaccggcgatacagacactgtctattacgttccttgcccttgctgtagcaaccaagttagcacccgaggctactaatgagactactctgccgtctaggcattcacaaatggggacagtggtccaaccgttggtacaagaagtacatcatgcttgacccgtgggactttgaatggactgaatatcgagttcacagaagtctgaaatgttcagagtgtaatcatcagaaagataagtttgtcgagaccctgacagaagtagggtctgcgcttaaaggaacgaatcagcctacttgggactgattcgctgttcctagtgcggcagcaagttctgcctttgatgagtccaatgcggttgcgagcttctcgagcagctgtgtcagcatcgtgttttgaattcggagttgctgttctttggacagcagctcttttaccttttccaaacactggtctgcctcagcgccgatcttcataagctcagcttccatgtccgctttctccttgcgggcatcgtctctttgcttgatcaggtcctcgatcaagtttccttctgcacggtcacggaccaactctagcttatcgcgggcgaggcgacgcaagaacatcgtcgctccacctagcgcggctacgactgatccgccaatgattgcaggggtgattggttccattactttaggatcaggttgaggacaattctcttccaggcaggaaggtctttttcttcgtgccactgtctatggctaacgaggtcgccttttggaaatcctgtttcgatcaccgtatcaatgcgtcggttgatggcttcaattgagtttcttgcgtcatcaagacgcttctcgaagctttcgatcgacacctggacttcttgcacgatgataaggatctgagccagtaggctttcggatgcagcttggtccatggtagtctttaagggcggatgggtatcgcgatatttatagagaaactttactgaaccgttatatgcagaggtcgtgaaggaagtctataaatatcgaggatatcgaattgataaggatcgagccttgattaacctagaccaactctatgctcgcaccccggtcactactttcaccggcgccgagattatcgcggtccagaaggatggcgtgacgggtgcatctgttctgtcgacactgaagaactttctgaaaagcggatttgttgccaacgatgtgagtgatgcaacgactgtaggcaagcagttgatgaaggttgcatccgtttcagcggcaaagactctccttgaagtgcctgagccaactccggagccgttggctcctgtttcactgactgcaagcactacccttgcaaagacacacgccaatcgccgagtctttgtgaaagcagctgcaaccctcaccaccaatgcagctgtaatcgctgatactgacacgttcaccatctacaatcttcatacggctgcggtaacgctgactccgaagagtggtgaaactttccgcgtcaaaggcacaggatcagcatcgacctttagcattcctgcgaacacgagtgtgcgagttttcctaatcgacgccaccacttggttcatcgagaattgatagatggatgacctaatttctcttcccgtagtaacagatgacttcgacggacagacagctgccctcgaccaagccatccgtgaggctgcggttgcattcaatttcagctatttggcagacgctcctacatttgagcagctctaccatgttcctgatcttgtctacaaacttgtcgaacactacacgatgcgaggcttcatctgcacctacgatggtgaggcaggtaagctaaagattgcatgggatcacccaaatatgtcctggctcgaggcgagggaaattactcgtgcgatcccggaaatgatcccaaacctcggcattgcattccgtgctggtctgctctatctctgcatgaccaacggtaccgacctgcgcgccgaatccgacttcaccctgcagactaagctcggaaaggaaatcaaggctgctgctactctgggcaacctgcagctttccttcggcttcccatctgtgccagctccagctgttcagaacctctttgctcctaccttccaggttttggaagaccaaggctttgagatcacctacagcgcaaatgctaacatcttccttttgaagtggggcacaagcatggcattgaactttgtatctgggcaaacactcgaggttgtgctgtcttgaaaggtctcgtaatcggcaagccacactctggcaacgtctgcattaggtaccgtgaggatgcgtcttcgacggacttcctgccactgcaaccaaacccgtctgagccacctatcgtcattcctatcgaaggaactggcgatatgttccgtgcgatctacgacaaggatgctaacggtgtagttgacacagccgatgaagttcctgtctcacacattcctggccttcaggataccatcaacgacatctacaaccaaattggttcgggtggcggtggaggaggaaactcacaggtcatcttcgtaaccaacacaggtggcgagacgttcctacctggcatgcctgtctgtaaggtcggtagttcctacctgcgtgctcgctccactggtccaagacagacatgccttggccttgctgttgatgcgtcaaacccaggtgaacagctaaagattcagcaggcaggtctattcactctgtctcctgaaaattgggacttggttaccaatcaggttggtggccttggcacgacgatgttctattacgtgaacatggattcgcaattgaccatgactccgcctaccgacttccctgagtaccttgtaaaggtcggctacgccttaaataatactgacttcctgattgaccttgacttgtcaatcaaactataagagacggacatggcagacttcaaaccccttaagctaggctctaacaacgagctgactcgcttccagaccggagacagcgtcggcattgacgccggtggtaccggttctactactgcggctggcgcccgtacagcccttggccttgccatcggtacggatatccaggaacacagtgacaaacttgacacgctcgcagcactagctggcaccggattcctggttcaggacggcgcgaatggttggcttgcgcgtaccgtagcgacggcctctacaactcgactgactgttaccaatgcgaacggcgttgcaggcaatccaacgttcgacctcgccacagtcaccgacagtggtacaggtactttcaagaaggtaacggttgacggatacggacgcgtaactggcacttctaacgtaacgacagcagacatcacagcgctcgttgactcgacctatctgaagctgtcaggtggatcgctcacaggtttcctgacgctgcatgctgatcctacgaatgcgatgcacgcggtcaccaagcagtacgttgatactgtgatggcgtctggtggtattcctccgttcgctcctgcaaaggttcgtaccacagctaacatcaccctaagcggtgcacagacaatcgacggcgtttcggttgtcgcaggtgaccgtgttcttgttgcacaacagactactgcttcccagaacggtgtctatgtcgttgcggcaggtgcatggacacgcgcaacagacgcggatcagactgctgagttctctcctgcacgtcaggtatttgtccagcagggtacactctatggcttcaccacatggggcgttggtaacacgactgctcctgtcatcggcactgatgcaatcacattcgtgcaggttggtggtgctgctcaatacactgcaggtaacggtctcagcctcacaggtacgcagttctctgcggtgggcgtttcagggcagatcactgtcactggtagcggcattggccttgcaacttcaggtgcaacggctggtacctacaccaaggtaacggttgatacctacggtcgtgtcactgcaggcgcgacagctactccagccgacattggcgctcaggcttcttcgactaacctcaccgcgctgtctgcctacaacacaaacggcttccttgtacagtctgcggctggcacattcgttggtcgctcaattgctgtggcttcgactacacgtctgaccatcaccaatggtaacggcgtatctggtaacccaacacttgatctggctaccacaggcgttacagcaggtacctacaacagcgtgaccgttgacgtctatggtcgtgtcactgcaggtacttcgactgcttcggatcaggttgtaacctcgctgacaaacggcaacgcaggtgcgatcgtcattggtcgtgcagtctacatctccggcgccaacacatgtgatgtggcaaacgccaacaactatggcacggcaagcgtcattggtatcgcaacctcggtgacaaccgcatcaggtgcagcagtgaacgttgctgtttccggtgtcgtcactgcgacaactgctcagtgggatgtggtaacaggtcagtctggtggtttgaccacaggtgccaagtactacctctccaacacaacctcaggtgcattgaccacaactgctccagttacaggcatcctggctccggttggtatcgctgtgagctcaaccaagctggctctgcgcctcgagcgagttgttgttctctgatacacaatcaaacatcggttgatacggaagaggagcctagtgctccttttcctttgaataaatatcgctgtattacaggacagaataatggcctccatcaagcctctttatatcaatgcagcaggactcgaggctcaggcagcttcgggcgacacagtaccggttgattacggcggcaccggtctttcctctctgactgcaaacagctatcttcgtgcggtgtcaagctcagcctttgagctccgcacaccagcccaggttcttgctgacattggtgcgctgtctaccacaggcactgctgcttcggcgactatccttgcgactgcgcgtaccatcaacggaacgagcttcaacggctcagccaacatcacaacttcaacttggggtaccgctcgtaccttgacgattggctcgacaggaaagtcggtaaacggttctgccaacgtgtcttggaccctggctgagattggtgctgcaccaactgtccatacgcatgtatctgcagacattactgacctgcaggcacagctaagtggtcgagttcagcgcggcacgcttcagttgaatccggatggtacagcacctgccacattcttcaacgaagtatctgacactctcgcactcaaatattctaacaactctacaggttccacaggatacccaaccgagtttggtgcgaccctgtctgtgatcatggaaaagcagtcaacacgttcgtttgacctgcatatgccaaccaactcggctaataacctctacttccgaggctattcgtcggcaggtacaccaactgattggaagaccattggtgccttgcaaaacaccaacacctggactgcaaagcagacgttcgcaggtggagcgaatatggccaacgacgtactccttgagtacggttcgggcggtgcaacaatccgtggctcgtccactgggtcaatcatcctggcttcaggtgccgctgcgggtgcaggtattcgccttcgcccaaacggtgacactagcctcactggtcaggttgccattgacactgatggtatcgtagtagcaacaggattcagcggtccgttgactggcaatgctacaacggctaccacacttgctactgctcgcacaatcaacggcacatcctttaacggatcagctaacatcactaccgctaactggggtaccgctcgtactctaaccatcggtggcacaggtaagagtgtcaacggctctgccaacgtggcatggagcctggctgagattggtgctgcatctgctgatgacatgcttttgatcggtggcgacaaccaaatcggtaacggtaacttctacacaggcacagctacaggttggtcgggtggcagtggtagcatcggaagcggaactgctgttcgttctatcgttgatagcactcttgcgagtacgggtaaggcatatcgaatggatattgccaacttacctaccgcaggctacattgaaatcatctctaacaccaacgtcaagattgctcgtgttcagggcggcgaaagagctgtggttgcagcatacgctcgcggatcggcaggcgttcgtgtcttcctgcaaatccgttggaatgatgaaacaggtgcagctatctcctacactggtacacctaacaattcatcttacctaacgtctgagacctggacaaagtacacctacagtgctacggctcctactaatgctgtatctgcaaacctttatgtccgagtctacggcaacaccgcagctgatcaatggttcgagacgagccatatctcaatgcaggttggcaatgtaagcacaggatatgctccatccattgatgagctgcgcaacgatttcaacaacctgatcaccactccaaatgtctggaatcaattgcagacattcaacggaggctggaccctaccaaacaacaagatggggttgctaggcactggtggaggttcgatccgaggaactgacacaggtagcgttgtactgtcttcgggaacaggcggcagcggtttcatctacgttcgtcccaacggtgataccagcacctcattccagacagtgttctatgccacaggcaatgtggacatgccaaccgttcgtgcaggtgcatctactcctaatgccgctggagccgtgctacttgaattggtaacggaaagatcatggcagttccgtcagcgcaacacaggagcgacaactcagctagaattgtttgatattactggagctaaggactttgtcctgtccaacacatcaaacacgaacgtcattgtgatgaacccgacgaatagctcgatcagtgcaacgacgttcacaggcgcattgactggtaacgcgacaaccgcaacaactcttgcaactgctcgaaccatcaacggtacatcgttcaatggttcggcgaacatcactacatcgctttggggtactgctcgaaacatcacaattggttcgacaactaagagcgtcaacggttcggctaacgtgtcttggaccctggctgagattggtgcggtagacgcaaccggctttgtcaagaaggtcggcgacactatgagcggtgacctcactgtttctgcaaatgtcagtggtcagatggttcgtgcaggtttctctgccgaccttgcatttgctcaggtcagaacccttggcgacggttcaagtatcgtttggtgggaatccatcctgaagagctcaggcggtccaggaggtgagtcttggtaccgtgcaaagtctcacgtatggacgaacgatcagggtaacatcagtgctactctggacacatcaggcacctttaccgcatacaatgttcttgctgcaaaaagtttctctgtcacagattcaaccgcaacaagcttgatccaaggaaacctggctatcaacgatagcctaaacgccaggggcgtgatgtacttcggtggtaaggttgccaacaccggaaacaagctccgtatcctcaacccagattcttctacctctttacgaattgatgctgtgactgcagatgcgtctgcatttgcgcagatgaacttctatgcatctcagttcacattcatcgttggacgaatcggattcaacggtcaccttaactcgacagccactgcagctgttctttctgctcagaatggcggcacagtataccttcgccctaacggtgctgacagcgacactggtgcgacaatcatcggaaccaacggtgaaatgaatgtcagcggtagcatccgacttggaggtaacggtcgtaacattcgtttgtatgataacaacgcagacactgcttgcgttgacattggttcgggtattggtacaggcactgaccgtggcggatatatcatcaaccgaaacgctggtggtgaactatctctttgggctcgtaacggtggtgtccagctgcgcctcggtcttagagacggtgtcgcaggtgctgtagcacagctcaacgtccctatgctcttctctgcaccagctatggatcctggaaacgctgcaacctggtcgatcctaactacaggttcctacggtggcggtatcggtatgcgagacaatgcaggtagcggaaactacttcggtggcatgtatgtcggctccggtcagatgtacatcggttgtggtgcaccaaatgaggcaggtattcgtgcttcggttgtgatcaagaacgattaccaatggtacttcacaggtaacactatcaacatcgaaggttcctcgcctactatccgtgtctacgataacgatcaaggctacaccagctggatccaccacaacgacggtaaccatggattcctggcacacaacagcttctcctgggcatgtttccgtaactcagggaatgactggcagtgtcagaacaacatcatcgcctacgcatctgatagacgccttaagaagaacatcgttgatgcaccaaacgatatcatcgagcacttcttcgagaatgtccgcatccgacagttcgattgggatgaagagaagattgctcactataaggtaggcatcaaggcacgagttggtgaggtaggtgcagtggctcaggagatgcaggcagtctattctgatgctgttgcagtcaatgaggcgcacaaccagatcaagaccaaagacaaccctaatcctttgaagccagacttcttgaccattgactggacaaagactgttccgcttctgattgccgaagtacagaaccttcgccgcagagtagcacaattggagaaccgagcatgagctcacgagtaatcacagaagaaagcatcacccgtattcgcgagactgttgcacctaacatcacgattcaatgggatccagtaaccaatggaggacaggtaacgttcttcatgcaggatcagatcacagagaatggcgtctacaaaggcatgcaacctcatcaaggactgcgccctaaggagaactctcttgatatgaagggtgtgctcattgtgcctatggaagagatcatgaactcgaccattgtgacatcctcaggtgaaacgcctggttatgtgctgatggttcttatcaaggcatactttgagcaggtattcacggatcgtctcaacaatcaggacgctgcggatgcactcaagggcggtacaattcctgtcgaagagaaggcgagcctctaatgccaattccaggttcgggtgcaatctcatttgcagatctaagaaacgagtttggcggtggtaaccctgtaagaatctcagactacttccgcggcggtccgcgagttccaaacacaggaacaaacgcaggcgtaccaacaagtggaatcgtctatctgtcgcagtatcgaaatgcgagtgcatctacaccactgactgcatcggttccggatatctacgcatcgcgtctcccaaacggttcggctacacgttcaacaacagtgactgcatctggtggtacaggttcctacagcctcaccaatgctgttcttttgtcaggtagtgcaacagtttcccgaagtggcatgtctgtcaacgtgacagcatctgctaccaacgctgagagaaacggttcggttcgcgtaaccatttccgatggtgcaaccactatcactcgcgacttcaacttctacatgcaattcggtacgccgctctaagcctgtaaataatggacaacgtaatgatacattgcccggagtttacccaatgaagtttgccgcattccaaaacccagctgtttttgatcttctgaaccgcctattcgtggctcaggtgcctgtcaaggtcgcctacaagctcagcaagatccagaaggctgtgaccgttgagtcggaacgttaccaagacctgcgcatgaagatcgtgtccaagtttggtactaaggacgagaacggtgagctcatcgtcgacgaggcaggcaatgccaagatcgaggatgcagccctgaatgacctcatcgaagagatgaaggaactacacgacattgacgttacgctagagaacaagatcaagctcgatgacctcgagaaggttgacctctccgcaacggatctgtctatcctagaaatgttggacatcctagaagagtaaagatgcaaaagacaaaagttggtcgttatgtctggaatatgctgatcgccattgatcagtttttcaacacagtgtttggtggtgacccagatgaaacgatcagcagccgaattggcaagatcacagctaaccgcccgaagtcttgccaattctgtgtcttcctttgcaaggtattgaacaggatcgatcgtgaccactgtaacaaggtcattgaactcgaccgaggttggagagaggtaatcaagtgaccatgagcactgaaactgtagcaatcaagatgggtgcacctgcggatgtcgcacgagcactcgagaatgcctgcatcaagtttggcatcacaacccagaatcagaagtcgcacttcctcggacagatctttgttgagtcgggtggcttcaagacactacgcgagtcgctgaattactctgtcgaaggagtgatgaagacctttagccgtgctcgtatctctgaggctgacgctaagaagtacggacgcaccgcaacccaaaaggcgaaccaacaggcactcgccaacatcctttacggtggcatgtggggactcaacaacctcggcaattccaaggaaggtgatggttgggcgttcattggtcgtggcctcaagcagctcacaggtcgttccaactacacagcttgctcgcttgctctgtatggtgatgatcgccttgtaaagaatcctgctctacttgaacagcttcctgatgcagcactgtctgcaggttggttctggtcttcccgtggactcaactctctggctgagtctaactcgtatgaacaggtcactcgcaagatcaatggtggccttaacggatacgatgcacgcgttgcagcaacaaagaaggcatacgcgctcttcgaatccctaaagggctaagctatgtctcaagcaacacttcaagccgcaactctagctatcctcgcaggtggcgcatcctggacacagggcgcccttgcacgaaaggctgatggtctaccatgttccccgttcaatgaagatgcagttacatgggacatgatgggcgctctgatcaaggctcaactcgaatccgacgagcctaactggaccagctatcatttggtctacaacgcacttcgagatgctctgcctgccgactacaagagcagagacatcgaagcttataatgatgacgcagatgtcgtatggggcgacatttccgctttgttcgcctgattcaatcgaatcaactcaatccaacccagactcaaaattgaatattttagaaatattctgagcacaatacaaggttgtttggcgtaacatttctgttaccctaaacggcactgtaaaggagacagattatgaagaaatttgtaattttgtttctgctgctgatcacttcaactttttcaacattcaatacacacgcagccgaaacgatcatcatgcccgaagtaatcctggcacctgcgccagagattgtcgtggatacatccatcaaggtacacactttcgtacctgacctctcagagccagacatccttgtcgcagctctacccagtgaagcagagcttcgttgcctgcagaaaaatatctattacgaagcccgaggtcagggcaccagcggaatgacagcggtcgccaatgtgaccatgcaccgcactcaagacagtcgctatcccagcacagcctgcggcgtcgtcaaacagaaaagtagaggcacctgccaattctcttggttctgtgatggaaagaagagtggtggccctagccttcgacaggcagcagacgttcgagcatgggagctcgccggtgagattgcactaaaagcactcacaggcaccctgcgcgatatcgtcaacggtgcgactcacttccacaacacgtcaaccaatccaggctgggctcgaaagctcaaccgaacggcacgaatcggaaatcacattttctatcgttgacctgttagtctaatttggtaaccattcttcggagcgaaagatgcactaccacccgcagcctgataccgcagtgttcgtagttggagcccatactctttcgacaacactgcggtggctcggaaaagaggcaaccgttgacatcacaggtgagaaacttcaagacgtgatgcgacgagttgaccgcgcaactttctacaacaacggtgaagagaccgattgttctttctacgccgctctgtagactacgatcatccaaacaggaatttgaccatgtatctgcagttgtcagactttgaccacctccgcgaaaacccgaacgtgcgtttccgcgaagagaacgtcgccggtaaagatgtcgtcatcatctcttacatgctttccagcgacgagctgtggaagctgccgctcggtgtggaatgccgcggcatcaccttcgatgcccaaacgggtaagctgatctcgctgcctttcgagaagttcttcaacgtcaacgagaaagcgcacacccaggctcacatcatccgtgactacaaggtgcaggctgtcctggacaagcgcgacggttcgatgatcacgccgatctgggctgatggtcgtatctatctcaagaccaagaagaccttcacctccgacgtcgcagtggcagctcagcgctccctgtctgtcgagctggaacgcttctgtgaagccatgctcgaactgaacttcactccgatcttcgagttcaccgatcctgactgcaagatcgtcctcgactacggtcatgactctcagcttgtgctgctggctatgcgtgatatgatcgacggttcctatgtctcgtacaaggacctggaccagatctccaaggcttggggtgtgcaactggtcggcggctataacgctgactataccgttgatggctacctcgagctggcaaagattgccgagggcatcgaaggctgggtcatctacaccgatgaaggtcgcttcaaggtcaagacgaagtggtactgtgatcgccatcacctgatcgatattcgtgaacgcgatatcgctgccctggtgctcgaagagaagctggatgacctgatcccgaacctgctcgcaggcgatgcggatatggaagccatccgtgagatcgagcgccgggtgaccgatggtatttcccatatcatggaaaccgttgccttccttggtgtccacgcaagtggtatcgacctgggtaaggatcgtgccgattgggtcaacgccaactgtggcaagctgtcgaagtttgtccatcgtgctgctcgtggtgtggagaactctgacgagtccttcaaggagttctatcgtcagcactatctcagcacattctcactccgttcaatcggcaaccccaatttccgcgacgaggaagaataatgaagtacaccgttaccattctgttcaaaggcaatccgcagcccgtcatcctcaatgaggttgaagagttcactgtgaagtatgaaggtgataccatcaccaacctccaatggaagctggcaccaggacagaatatgctctacattgacctgagtcagatcgcattcgtgttcgcagtcgaggacaagtaagaccaaagttcctgcaaccacttcgtaccaaaacccctgagacccagagcccttgtaccccaaggttctctgggtttcctacgtaagtgtctgattcttggctccaaacagattagcaagtgtctgatctataagattgtcctgtcctacgaaagtctttaatatgtggttgtggggcaaacatacagcccgaaacgaaaagacaaaggaacgcagacatggccaagcacgtagaactgactccgagcaagacctacaagactccggaaaacgctcataaggcggtggagaagttgaacttgccggacttcgtcggtgaccgccagctgcgatacatcatcatgacgcacaccgacggtcgattctatccggtgttcctgggtgaaccggcgatgcaggcaggtgttcacttccacttctgtatcctgggttaaggagaagatcatgagtaagatgcgcatcctgagcggcaagaccttctacatcgaccgataccatgacgagcaggtcgagcgacacatcctggtcagcctcaacgcacgtgagcgcaaggccatcctgaagaacaggaagacccgctacaacttcatccgcaagctgcaggatgccggcatcgtagagcgcagtgggtgccagtgcggtcactgcatgaacggttgggactgctgcggcaggtggttcatgtcccgggcgaagatcattcctgcgccgacgggcgtctacatcgtcaagacttacgagaggaacatctgatgaagaccaagaccaggaacatcctgattggcttcgtagtagcactgaccatcggtgcactgtggatgacgaccccgaccgaatgcacgcacagcggttcggtccccaaatattgcgtggactaagatcatggaacacaacgcctggctgtataccaaagaccgtagcgagctcgaggacttcgccatcggcatgggcattgacccggagcagtactccctcgacgaatccctgattgatgcaatcatccagaagctggaggaacagaaatgagcaggcagtttgtcatcctcaccaagggcggtgagcaggtcgctgagatcgacaccaacaccttcgccaagatcatggctgggaaccgcggcgagatgcagctggttacgacgcccgcaggtcgtggtgtcagcgcctttgtggtcaatcagccgcacagcttccaaattggcggcacggggctgaccactttggacatttcgatcgcgctggatgcgggttatcgcatctaccgttccgaggatatcttctaatgaaggtcgagaacatcctcctgcaggaatacagcggcgaggctgtcaaggacatgccgaagatcctcaaggcacatcacttcatcatggacgcgaaaaacaacatgacggaacgcgccatggtgtatcgtgatgtggctcgccgagctctgggacacgacgtcccgatggacgtttccgatatcgaactgatcggaacctactaccaggagatgtgcaatgtcttcctccgtcaataaggtacgcctgaccaagtggcagcgcggtgaaatgtccttcttggtctccgtgatggaggagggcttcgacgacaacggcgacgtgatggaaggttacatcgcgcagggctacggctttgaccgtgctgaggaactgaccgacctggacaagaagctccgcttcaagcgccaggcaggctccttggaagtcgaactgaacatccgcgaagccaggaccatctggcacgaattcgacaaccgcctcgatatcgagctgagcaactcgtgcagctcgaatgatgaacatggtcgcgcctaccgcaagctcaaggatggtatggcgcgtttggaagcagttttcggcagtgacgtgaggaagaagcaatgaacccggaagatctcaagcgtatgatgttggccagggcaacgaatgcagcacatgcaatgtggggcgcaaagttctgggttgatcttccggaacaggagcgtgagaagcgactgaaaaagatcatggacatcctcggggagttctcctaatgctccgtcgtttcttcaatcgtcagaagcctgtcagcttcgaggcccctccgccgcagggtgatatgtatgagctctggctcaaggtcggcaaggtgcatatcaagtccgcatccttctgtcatcgagttgcggtgcagttgatgaacctgcgcggtgggaagtgggtggcccagcccgactaccacggcgtcttggtaggtgtctacaccttcactcaggacttcatcttcatccgtgtccgcgatgatggatatggcaacgagttgcagcggattgagatcagcatcactgaaggctcctacctccggatcccctgaaaactggcctacacatcgtcttaacgagtggtctatataatgcagatgccggcagaaactttctagtccggcaccaaccaaaaggatcatcgtcatgtctacgctcaactcccccgctcatacctacgccaagccctccggtgctgtcaactctgtccgcaagatgcatgtggagcgcggcggtgaggaagttcgcttcgtcatcggtaaggaccctgcaacaggtcgctactttccggtcttcatcgaccgcatcaagcaggtgagtgatcaggagatcatggccaacccgagcgccaaccaaacgggtcgcgcaaagaagcgagccagcgctcgaaaggctcctgcgaagaaggcagccaagaaggcgaccaagcggacaacgcgcaagaacacgttgcactgaaacgaaagtttctgagagaagctgcccgtaagaaggcagcttttcttttggctgtttttcgtgaccacacaagaaaggaattatctatacaatttgtatatcgacaaacggagcaccaatgtgaagttgttcaagaccgccatcgccaagctcaacgccatcccgagaaagaacatcgaacgtgtcgcggcagttgtcgtgttcactgcggtgaccgtcggtctggcacattccttcatcaatgatggtgggatggaattcttcaagccgaagaccgtcgcggtggctcaggttgatacctacgccaagccgatcgtcgaagagggtttcttcctgaccaagacgacctggcctgattacaaggacacggtgtcggctgagcagtatgcgaaccaatcgcagttcgatcgcacccacctgggtccgtgcagcaaggacaagccgtgcgagaagccgaagagctatctcgactataacctcccggactacctgaccaagtaaggaaacgagcatgaacccgatcgttgaaaacgcatacacctatcgcatccagaacgattctgagactgttgtctggaagtcccaggctcgtgatgaccgaaaggtagaagccatcaagtctttccgtgccgccaccggcgcaggtctcctggaagccaagcaggtagtagagcactacaaatctctctacgatcagaagatgcgcgaggttggttcgaagcctgccaatggcagccgtatcgtcaacctgcgtcctggcactcgtctcgtggtcgccgaagatgtgcctgggttcttcaaggtaaaggagatcaccgagcgcgacctcggcattgtggacgagtatgatctccttcagttcattgccgatacggcagcgcgcctgggcggaccggtggcgtaatgcctttcgtacttcaccaccgccgacaggccagccctctgcctatggtaaaagaatggtctgaggtcgccggctcctattctgaaaccatggaaggtgtcaaggctgagatggaatggtgggaccgttataatgagcaataccgactgacggattgggaattcaaagtggtgcaggtgaaggcgaggaagggatgatggaaaacgatttcggcattgactatcatctcaacatcatgaacaacgggcgcccaactccttcggactatctccctcctcgcccagagaaatgcctctggaggatcaccagctttgatggctactatgccacctaccgcaccgaatgcggacagctggaagatatccgtgccgaggaatgcgttggaatgccgatgatccctgagcctcaaggaaagtactgccatcattgcggtggcaggctgcatgtgaactcgtcgttcaaaaggaagacacactgatgaagttctacatcgtgggtggcgcagtccgagatttcgtgctgggcaagcacccgaaagacatcgactacgttgtggttggtgccacccccgaagacatgctgggaatggggctgaaacaagtcggcgccgacttccctgtcttcatcgacgatgagggtaccgaggtcgctctggctcgtaccgaacgaaagacaggcgtcggctacaacggcttcaccactgaccacagcaagactgtgactttggaagaggatctgtctcgccgtgacctgacgatcaatgccatggcaatggatcgggttaccaatcagatcatcgatcctttcaatggtgagaaggatatcgaggctcgcctgctgcgccatgtctctcctgcctttgcagaagatcctgtgcgtgtgctgcgaatcgctcgtttccgagccaggttcggcggagagtggacaatcgcggatgacaccatgtcgctgatgcaggctatggtacgccgcggcgatatggctcacctgacgaaagaacgtgtgctgttggaaatggacaaggcattcagtgagccttatcctgagctgttcttcaccacgttgcaagagattggcgccttgaaggttgtcttccctgagctggtgctggttgatcacctggactatctggagatcagaaaggcagctggtgcttcgcctgcctacatctatgccgttgtcgccttgtgcatgtctgaaaagaatgcgctgcactttgaagcgcggatgagagtgtgcagtgattggcgccgaatggcacgaatgtatcgcatcatgatgagctgccgtatggacagcaatcaggtcgacattctgtacaagatggacgcctacaggcagcctgagttgtgggaggagttgataaggaacatggccaaggttggaaggactcgtgagagattcttcaacgacctgttcgttgtctggtccgccactcatggcatgggcttcatgaacctgaccgaagaacagcgcaacacgctcaaaggtccggaaattgctgaggctatcaaacagctgcgcaagaaggtgatcaatgaaactcggtgacctgctcaacgacaatcagctattggatctcatacggcacatccgcgccgtgcatgatgaaaccaatggacctaagaataagcttgcgcgagaactaaagcaagtgctgtccgaattcgagttcgaaccgaaggtgatcaatgggtaaggtggtcgtcgatcaaggcgcactccgaatggcactcaatgtgctgattcgggcaggcaaaacggaagtggctgaggagttggaagcctcagccactgactatcctgagcttcctgcggacggatgctatatcgtccgctttgatgatgcctaaaaggcagacgtagacttctgcggatacgacgctcgagatgcagcattgaagtactacgatcacatcgcttggaattggaacgggcatctctatgtcaagatcgattccaacactcgcgatgcggagaagcagttcccgtcactcaaagtggcagacatacatcgcttcggtcgcgccaacccatcacaaggtgaggccagtactttccgctgatctggtcgttcaaccagacacgctcgccgttggcatctttctcttccaagacgttgtattggaattgatacaggacttcgcagaagttcacatcacgcttaagagtatggagggacaagatgtctctcctgattccttttgtgccattctctttcacatagttgttgatgaactctgaggaagagaagtaggtcatccaattggacgctacctttgagcggcgcttctttcctttctgtttgcgcataccgttgaagaacttcttaccaatgtacttcttgccgttcggcattgtgatcaggtagacgaaaccttcgtagccgtcagcgccttcctcaggaaaaggctggccacggaagtaccagggatcacactcaatcactttctttgcacgagccatatcacagtcatctgttaggtaggatgagatatttaacctcggcccctacacagtcctccagatgttaaaaagatgttaagcggaccaccacagtccaatgactctacgggatgcccagcttttaagcgctgatccagtaaccccttgatattactagcattctggtcaggaagggcaggcacgtaagtgtctgattctattgggctccagcactcaggggctgtacagatgacgggtcagcgactggcagcaatgtggttgcgggctccttaacggatcctatacactcagggtgcctgacgtctgagtcaggaaatcgggggacaaaccagtttagattgtgaggagagtgtcatgccgcagccgagatatccgatgatcggggtagtggtagccgtagccactgactgggaattggtgaaggaagtgaacaaggagcttgtcctacatggagtgagtcctgaggcaaggcgagcattttggtttgaggtcctcaaggtagacaacgcgttgaggatgggtgagatagcgcgagagtgggtcacggtacatccaaccatccaataaaaggaaagcccggaccattgagcccgggctttattgcaactatcaaccgccgaggttggtcccggcattctgtgctctctgattgtctgcactcgatccgatctgtacccaacgtcggtattggagtgttgtggtgacagtctgataggtacctgagttaccgtaggcaatgtccatggcgcctacggcaatcggataagcctcctcgagtcgaacaccataggtcggctggtccatctcattcaagttccacatctccacattagctgtgaactcgttgtagaaattgagcgtgttggaacgcacattgatgacggtattctgccataggtcgaagtatctacgggtgtctgcatcagcatcagcgtagaaggagaacgtcacaggatcgtatgcctgagtataaggaacacggaacgatgagctgttctgtgcgcgttcactcgtcaccagattgcgctgcgggaagttagccgtgtggcacttgatgttgatcgaaccgatgccattgaaacgtgcttcctccaactgaaggcgtccgcggcgtactcgtgcatcaatgaaatcagcactgccacccacaccctcaggcagcacaaatcggataaggtacttgtttggtctcatcactccacgttggaagtgagagaggaacttcatataaagggtctcgttactcatgccagtcctgtcttacgccatacctggcgggctgtttgtttctcaaattgctgtagcggaagcatcgctacctcttcccagtactcgtccgatacctgtaccaaacgtgatgtgacgtgtgatgcaagataacgatgaacacatggtgcgaagtattttgacttcacgacgttcttaaggagcttataggacacagccatataagccttgtcggttccggcacgcttacgatactcgatgagcttatccatcagcttcgcacgcatcacgggtggtaggtaatgcaggttgagcccaagccatccgtcggaatacatctcgacaggaatcacacagggaacagtatcataccagggcagtacgtctttgtacttcggatcataggtatagataaacatgccaccaatgaaggtagatgaattgcgcttggcaccaaaggcctcttcaggaactttcgcacgcttgagcttggacttagccatggtatagaaccattcgattgccttcgccgtacgcttacgatcatgaaggatcagcttttgctcgatggtctttttaggctgggcgcccgttctatttgcagtcttctttacagtagccatatgttacttccttttggcaatgcctaaatcgtattcggtcatcaccttgaattccatgccatgcttctctgcataggccctcgcggcagtccacttatcctgatttacttgataggtaacgcactcctcaagataacgctcaggcttcttccttccctttgtaggagcgatagtctgggactcaggtttgatctcaatcagcatagtctttaaggaaccatcagacatcttcaattgaatgatatagtcaacgaagtagcgacggttcttacactcagccgaggagtaatagggaataacgatctcctcactgttccactttactacggaaggattgaggtcacaccatctgttgaagcgaagttcccaggaagaacgatacaccacgtcattagcattgcctacgtacttttcaggatgaagtaggcgatagcgaccctgttgatacttgcgtgccattgttaaatcactcgtttaggtagctgcatagggattcagctataagttgataatctcggttgaaaacaggctaagaattgtgtgaaagaaacaccatagccgaaggcacctgccttttcacctggattaaatatctgtagacttctatatttaggcatacgattgtggcacgccaacgatcaaacaaaacgctatacagttacccacctgacctctcggacgagtcagtacacccagctgcgatcgagttcaagttctttgagagaagctcccctagggaaagcagtcctttgaatacggttcatctgtatatgcccgaatcggttgcccagccatctacggttgactggggcgactcaaacctcgggttcatcggaaacgctattagatcagctgccaacggtgctatggcaggactctcgggcggtctcaacgtaggtaaggctatcggggacgctgtaggtatggcaggtgatggtatgcagctgtcaggcgcctatggacttgcaaacctcggaagtgctgccgctggtctaatgggcggtaacgttactgcggaaggactaatgggcgctgtggctggtatgatccctaacccgtatgtgactgcgctgttcaaaggcgtgggactgcgtgagtttgcattcgtctttaagttctatccattccgagaagaggactgccaggagatctacgacatcatctctgtcttccgtgagaacgccttgccttcatatagtaaggactctatggggacaggcaataacaaagcactgctcaacttcccatctgagtgtgacatccgttacctatggcagggaaaggacaacgagtggattcaaaagttcaagcgttccgtctgtacgtctatcgacattgactatactggccagggtatgttctctactatgagaaacggattcccttcggagatcacaatgtcaaccaagtggaaggaactcgagattgtgacacgcgaagacatcgtggagggttactgatatgccatcgttcttcaagaagtttcctgtactcagctatacactggatgggtacaacaaggacgctatgaacatcgtcactgcggcggtgttgaagcgtatcaacgtggacaagtcctatgtctatcagtcctatgatgtgcctaatggtgcgagtgctgagtcgttggcatatgacctctacaaggaccctactctgtgttgggtgttcttccttgtcaatggtatggtgaatccgttgctcgattggcctatggatgataccgtactcgaggagttcgttgttgctaagtatggtagcctctactccgttgtctacttcacggacttggatggctatcgacttgacgatgtggctgaggcagctgtgcgtgcctatgtagatgctggtaaccctatgcctgcgaacgttcatcctgtgacagcattggaagccgaatccgtgttgaaccgtaagcgtggaaagatcgtcattgtggctccgcgctatatcaaccaatttgtagacttgttcaataagagcattgaaggaaaagtatgaccactgctacgactagtgccaactatggtgacctcaagaagtttgtcgtcaccattggcgacgttgatgtctctgctgctgtgatcagtgcacatgtctttcaggagatcttctctcctacgactactgccattgtgaacttccttgatacatcgaatctgttgatgactctccctatccgttctggtactcgtatcaaagtagagatcgagactgatatggcttctattggtgatggtgagcagtcgtgggagttcgtcatctacaagatcgccgataaggtggctagttcccagggtgtgttggagtactctgtctatgcagccgacgaggccttcctactcaatcagacaaagcgtatcaagagatcctatgcaggtaagaaggtctcggacattgctacatccgttgttcgagaagcctttggtaagaaggttgacgttgattccaccgacaatacgatgcagatgatcgtgcctgggtggactccgttccatactatgtcttggttgttacagactgccacaaaggatggcgctgccgactatgccttctatcagcaggctaacggcgacttcgcgttcaagtcgttcgaaggactctattccgatcctgacgagtactcgggtatcacgttccaggtgcgcccagctaatctaaaggacaacaagggtgattcactctacgactatgccactaccattggtgtctattggtttgaccacttcgacggactgagtaacatcgcatcaggttactactcctcaaagactgcgtcctatgacttcaagaccaaggcatgggaaacaaagacgttcaagtttggtgatgacaacgcgcaggacaagaagtacctgaaggtagactcggagtatctcatggatgccgaggatgcgaacatttcgttcattcctaagcatagtggcatgttcaagaatgcagcgtattcggatactgccgatgcctggattgcctcccgtaagtcttcgttgatgaagttcgagcaagagaagttgatcatccagttcccaggaacggcgggtgcagctagatggttcgcgaagtccgttgatgtggacctgcctgctcaggactctatgtccgatgaagagttcgatactcaacgtcgtggtcgctatgtcatcactcacatggctcacatgatcaacaaagacacctacaagatcaatgctgagctggtcaagaagagactcgaggaagcataacagctgactgagcacgcgcaccgctgctctgtttactcggtcaagacctacatacaccaatgcgatgacttgctcaggtaagccatcattctatcaataagagaattctatgtcgcaggtacacaatttttcgttcggtggcggtgccttcgagtggttcatcggagttgtcgaggatagaaatgatccagagaagctgggtcgtctccgtgttcgtgcattcggctactatgatgacgaagccattccgacttccgacctaccatgggctgtgcctatgcagcctatcacttcttccgctaagggtggtgtaggttcttctcctacgggtattcaagaaggctcccatgtggttgggttctttgccgacggaaagaatgctcagactcctatcatcatgggtacactcgcaggtgctccaggagggaagcctgatacgaacaatcttgctcgtggtgaagaccttggacagaccgtcatcgctgagaaggtgaaagccgtcaagatgtccttggcgaatagcaatgcgcttagtggtctgtctgctgccaccaacatggcgaacaagatcaactcaactgtcaaggatgctaagtctaagttgaatagtgttcgtgatcagttctcgaacatcgcaggtctgtcgaatcttcctttcatggctgggttgaacaatatctcatctaccatgacacagatcgccacacttccatctgaggctaaggcactgcaagcccaggttgaaggagaggtactcgcgatcaagggacaaatcgagaacctgaagaacctcgaccctgaggcactggcaagacagttggtacagaatcaggtgggtgatgtggaagccgcagtgagggcaatcaagtcactcgacttcgactctgtgatgggttctatccagagcattccaatggcgatcggacagatcggtcgtctccaggatgccatcaccaatgcaggaaacatcggaaagattgtaaccacgattcaagggctgtcgagatctattccgaatctcgcatccatccgagcactgggtacgacgatctcatcaatgaacggatggttggagcctactactatggctgcaccactctatccattgaacaagatcatggagaccgaaggaggtcacctacaggagttcgacgacacacctggtaaggaacgattccatcagtaccacccaacaggcacgttcaaggaagtacacccagatggatccaatgtcgataaggtggtcaaggacaactaccgtgtcgtgatgggtgatgactacctacacgtagaaggaaaagttcaagtcaacatcgtcggtgatgcgacagtcgtagtcaatggtgattgcacgacccaggtatctggtaacaagacagatatcgtgaacggaaattattcgttggctgccggaggtaatgtgtctatcgcatcaggtggagcaatgaccatcggtgcagctactcagatggctattcgtgcaatgatgatcaatctcaattgatcaaggcatgccttaaaccctgggttgagctggttcttgacccaggcacctttctttctaacttttctttctgataaatcaaattatacagaacggtccaatacggtgtccacaggactaaggacttgtacctttgataaatatcgtgacctaacagagacccatacaatgtccgactttcagcaattcctacaagaagcatccctcaaagagtgtgacgagctcaatgaaagcctaatccgttccgcaggtgcgtccttatacggcaaggcaaagactactcctgatcacgtcgcatcccaggaaaagggacatgtgaacattcacacctataagaccatccgtcgatcgggtagtgataaggaaaagacctatcacgtcgtgagtcatggcccttaccgtaacagtggtacccataagatcggttctcagcatacccatggatctggcggacaggcatctaagttggtcggcgtctccgaatacaagaacggaaagaagacgaagactcacggtgaagaccactctgccaactcccactccattcacgtgttcaagtaagtcgtaaatagaatagagacaacccaaggaacttttcataatgccaagctcgacctctacaaattaccagttcaacaagttcatggaatacttcctgaagggaactgcgtacactccgcctacttcggtttggcttgccctgttcacgactgtgcctagccttgctggtacgggtggtgtcgaggtaagcacatcaggtaccgcatacggacgtaagcagattctgtccacaggtacttcatggaacggtccatctggtaccaaccaggaatggtccaatgcagccgacgtcacctataacgtgccaacaggaaactggggtaccgtcacgggtgcaggactgtacgacgctgaaactggcggtaacctactctacatcgcaacactggcaactgccaagacggttaacaacggtgacggtgcgccacgcgtactcgcaggacagttgaagatcagtcgcgctacttgctgattgttggaaacacgaaaaagcccaggttcatcgcctgggctttttcacggctagtgatcttaggtcgttgcgatcagcctgacaaactcttcgggactgaccatgttttccttgacaccgtagtacgccgtatgccccacgacgccatccaggaaacagatctgggtgtaatgcgcccactgggtcgatttgttgcctttgacgagacggtggttgccgtcgtcatcgaactcgtggcgcatctgttcttcttcgagagcgatccaggttccttcatccagcggaccgacgacagcttcgacttccttcagccacagtccccaggctgcttcgtattcgccctgcatttcagcgttgtcccacctccgcgtttccgcgttgtagtacttggccttgatgtcgtgtgccttctcgtagttggcagacttgttccgcagggcggtgtattcgctgtggtgaatgctgttcatggtctttgtgctcacttgatgatgggttgggcttgcttcgactggtcgtactccggttcatccgggaacctgccgaagcgatcggggatcagcgcctggacaaagcctaccggcatgtcactatagaaaataccgacagcggtagcgtattcttcgagcgccttcctggtgtccgcttccacaacacggatggcgtgttcggtaccatcacggaacaccaacagtccctcgttgtcgcccatgacgaacttctccttcttctgccagccgctgatcaggtcactgatcaacttctctgcaatcatgggatgaatgttcccgaccatgatcacttcgggccagccacgttccgtcaaaccgacggtgtacacaaacccgggttccttgtctgccggatcaaacacaccgaccatggtgtaaccgttgagttcgattttgatggccagttcgatggcgagcatttcgttcatcagttcttctccagttgagagctgttcacttcgatcaacacgcgcgtctttcccagacgcaccgcatgcagtactccgtcctttgtgtagaacggcatgacgatgggaccctgaggacgcataccgccaccgatggtccacacccattccttgaagtccggtttcgccatccgttcctcaatccacttgcgttggaactcggtgagattgtaggacttgatgttcttctcgaatcgttccttagtgatcatggctcagcattcctcgagcttgatcttggaacccataaactcttcccacgccggaatgtccttcttctttccgtagaacgcgagactgacatacagccgtccctgcatgccttgttccgtgtaggtgaccttgttggccagcttcttcggaagacccaggtcgatcagtccctgtcggaactcacgcaggaacttctcgtcggtgtagatgaagccgtcgttgcgaacctgccacgtcttggcgtcgaaacgcgcgtcgatgtagagcgtcgcgtcatcctcaccatcgtagcagtatgcctgggcgatcttgatcgcattgataaggacttccttctttgcggttgaccaatgaccgcgaccactggtgtttgcgaacagttcaactttcatgagcatgtcctcagatgttttcgatcatgtgagcgcgatagcagcgtgccttactgcaatgcggctggcggaacatcaacttgttcttgtgggtcttagaacagtaggggcaagtgtcggtgagttcaactgcccagaccgctttgtaggtcgccgtctgttccgccgaagccttctggcggtcgacaaagaacgcaccgaaagcgcacactccctgtttcacctgataggagcgaccctgtgcaccgactgcatcaccaacttcgcctttcaggaacttctcgaagtctgcctgggtgtattcggcgatcttcggatactgctccttcatcatcttctggacttcggtgtctttgaagatcttgttgagctgctttgcgagttcagtggtcttcatttttggttgccctactgtttgtccgtgccacaattatatagaactttcgtgtcctgggacaatcttatagatcagacacttacgtatctgtgtgaattttagccgtgaaagagcccggatttctccgggccccttgtattacttggtctctgccaggacttcggtacgtcccagatgcacagcccgcagcccatcctcggtcatgtaggccaggaccagcttgccctcgacacgcttgggcttggagcgggtatggagccagtacttgaagtccgactcttcctgcttccgctccatccattcacgctggaagggagtcgggttgtagagcgccagcttgtcgctggagtcggacacggtctgggtttccatttcgtcacacatgatctactcctctgttatttcagcctccgattgaggcaatcaaactgtaacggagttctttctgcaggacaaccactttgtgaaggttgcggattccgctgatctgtgtttggaaattacgaccactccggtcccgtttcatcgacccccagagccacgggtcctctctaccaactccttgactagcggcttgacggtgtagtaatagagcataggtctctgttccatctcagctgcattgaggcgcctttcctctgcgactgcttcttcctttgtctcgaatggtccctgtacggagacgatgttacaacccactcgatagtgttcaacgattacgtatgccattgtcttagtcccatagtccgctgtgtgattcgtctttgaaccatttgtctgctcgctctttttccgcatcggtcatgagtgggtatgcgatacgaacatatgaacgcctttccgtcacgaggttctgtcttgcccgaatgctgctactccagttccaaaggattggctggagcagattgtcgatgtggctttctcttgtgatcattctgtctctacccaaaagtcaggaaagaaaatccaaccatttgtcgtaacccaatgcccatactccgcatcccacgagcagaccttgaagcttttcttgcgtgttgagacgtctatgtgaccatacatcgtgatcagtgttccgtctttcggcgcgcctttgacttcttttatatccataattcgctccttatgccacggcaatagccaggtttccctggctaccaccaacccctactacgaggtttttacttgccggtcagcttgtcgatgacctgcttgccgacgtccgactgtgccagaccttcgagcatgccggcgatcttcgtaccgcccttcggaccgaacatgtccaggacgttggtcacgccttcgttcgggttacctgcattgctgatgaccttgatctcagcaccctgcagagccttcgcaccctcgacaccgatcttctcgctggcctcgacctgacggagatcaatcaggtacttctggtaaccctggttctcaccgatttccttagccagagtgatctgtgcctgcaccggtgccagctgcatcgccttctcagcttctgcctttgccgtaccctcagcctggataccttccgcgttcagcttctgagcagccaggttaccttctgcgaccagtgtcgtgcgctgcttctgtgcttctgcgttgatcacttcctgctggcgctcaccttctgcctgcacgatcgcgacgtccttgacctcgttcgccttgaccacagcaaccttacgctgaatctccgaagaacgagttgcctcgacttccttgacttccatctgacgaacagtcgtttcacgctgagccgtcagcacttcctgctgcgaactttccttcgcgataccgaccgccttttccttctcagccgttcgctgaccgatagcctgttgggcttcctgatcacgcagctggactgtctgggctgctgcaatttccgcagtctttgcctgctgggtgttctcagcaactgcgacacggctgtcacgttcaattgccgaagtgcgcttggccatgatgttggcgatcacactcgaacccttggcatctcggatgtccatcagctcgatgttcttcaccggctcgacaccccagtttttcagctgctcgccgacttccttagtgaactggtcaccgaaggtagcgcggtccaccatgatcgtgtcgatttcatgcgaggccagaatggttcgcaccgcaccctgtacaaccgaagtcagctgttccttcagttcatcgaagctcgacactcgctgtgccgcaacgttcgagtctgcaattcggaagaagctcgtcacgtcaacaacgaacggaacacgttccttgtcgtacgcctcgtatgcgctcaggctcaggtcgaagaccgacacaggcaggatgatgcgcgtcagacccagcagaggaatccaggaaggccagttgtagtaagtgttgccaccatcctggtccttaccgtacgaggtctgcgacttcgaacgctggagcgtgtgtacttcattcgccggaacgacgacacgcaggttcagcacccagaagatagctgcaactgccacgagtgccgcaatgcctgcaccaatgagaataaacatcagatcagatttccttctttatcaatgaattggttggttacgttttcaataacgccaggtacgtaaaagacctgtacatcgtcgcacactcggaagaagttcttgaagtcccaatacccttcgtccgggctagcgagcaattcctgcataagagagctgaagaagtctacaaactgttctgccgcttccaggttcgcgtacttctcatcttccttacgtggatcattataacggagcgccaactgttcgtcatacagttcgatctgctctactgtcggcagcgcgtcttcggtaccccaaagtttcgcagcgacctccggatacttttcagcagcatacagccacaggttgaacagttcaaccgtttcgttttcagcgttaccggttaccttgtacggcaggtcggtatcgcgcttcttgtagcgagactcgaacgccttcgcgagcagcacatagaactgtgcttcatctttcgtcaggccagaaagaatttccgtcttgtagttgtcggcgtcgttttcccacgacagtacgtgtacctgatagccgggcttgatgttcttgctcatttcagtccttgatagtaggtcttgagttcttcgaggaactgctgtttcctcaacagagcctcagcggtgttggcgatcatgcttccgacgaattccttcggaggaatcacatcgagttcgacggcgtagctgtactcgcagtggattgcccaggtctccctgctatggagaatttcgtaccaggcgtcttcgatgtctccgttgaagtcaccttcgaaatacttccacttttcgtaaccgtgaccgccacgaccactgatccagtatcggttgaacttcatggcgcagccttctcgtagaagcgaagattgttgtactcatcgtcgcttatacgaacgaccttcgatgccttggcttccgcttcggcgaggttcatgatacggcgcagctcagcgcgatcatcatcgtaacgcgacaggtgcatacgccaagtaccgaagccccaaccatgcgggtcagtccaggtctttctctcttcgatccattcgtcaaacggcaggatcgtttcgacttcccagacacccagcttggtcagccaacgattgttgcgtcgcttgttctcatcgacgtgccactgataacggtcacctttgtaggtgtcaacccatgcttcatgagcacgagcattgacaccttcacgcgcccgctttgcgatatcgaagatgaagtcggcatcgaattcacgagtagccattagtagcctcgctcgttgtatcgctgagtacgctcttccttggtcagcacacggacaaagtccacacgctcggagtagtacccgttggaggaaccgcgccaggtgatgtgaacgaattcgcgctcagttcggattcggtagaaggtccaggtgaccgaatcgtactgacgagtttcatcactgttggattccacagtcgcagaacggatcggcgaaccaaccagagcgtgaacgtcgccatcaatggcgtcgatgtagacattctcgcagcagttctgctgatggaacatcacgaagtgctttccacaggtggtgtggaagtcgatctggtcgttggtcttctctacgcgctcgagagtcagaccaatcaagtcgtcgagcggaacatgctcaaatgaatcgtatcgcattgtatttccttaccaatcgtagttgaggcccttggtcgggttcttaagaatgctctcacgccattcgtggaagctctcttcagtgtactcttccttgcaaccgaaaatggactcatagagatcgatccactcgacagcttgataacgctcgtagccgaggtcatgcaagcgctcttcacgggcgccatcttcgatctttacgagcatgtgcagttcgccacagccgtagtcttcgaattcgaagatgatgtcttccttgcagaggcgcttgtaggcagcccaacggtctttgaaaggaatagccttgttgctcagttctttgatgacagactttgcagcgtcatcagcaacttgccgaagagaaatcacggcgtcaattgcttctttgttaagagcggtcattacgtgtcctgaaggctttggcagcttgctcgagagcagccgtacggaagagggtctgtgcgatgttgagtgactcaatgccaggaatcaggttgagcatggacgcacactcgcgaaccacgcccttcgatttcaggatgccggtttcagacatcctggtcagctcatgagcaccctcagccagatttgcttcggcaaatttctttgccgattccatgatccggataatctcgctcactggcagacgatcgtgttgccgttggagtccttcatcagcaccgcgccttcgggagacacgacatacttctgaccgtcgatacagcgagcctcatacgagacctcagctgccgggcgagagatgttcgacccaccactagcccaggtcttgaatgccggaatggcaatcgcagccaggatggcaatgatcgcaacaacgatcatcatttcaatcagcgtgaagccttttgcgttcgaattcttcatagcgttcaatgtaagcctcataatgttgaccgtgttgggtcttgaatttggaatcgagatggtctgcttgcttgaagtgacgattggctttcgcctcgtcgtcacgatcgttccacgcgttcatcaagctggcgaacacagcacttctcactgcctgcgccaactgatatgttgcgaagttcattttgctacctggatgcagtacgccttactttggattgtatagtaatagcccgcttctaactttcgtacttcctgtgaaagatagttcgcctgttggagacaaagttctttcgtctccaccggaatggtggtctgcgaaaccgaaggtacacagcctgtacctccgcacgttggtttgctgatcatcaccagaacgagcgcccactttgccaggatcattcgccgtactccaggcgaatctgacgcgccagcttggtcaggaattcgtgctcaccgccgtagtcctggaaagaaagacgacggtcttcaccgttgtgaatgcggaaagaactgccgtgacccttggtctggacttcggcaccggtcagtgtgaacggaatgtagtagcggtcgtacgccttgtcgtactctaccttgggcagcggtggaaagatctcgtcgagaatagctttcgcttcttcagaaaaatcgcactggtctttgccttgggcttcgagcagagcgtcggcgaggtactcaatcttttcttggcgtgttctgttcatgttcacaatgctacagttcgcctacgaaagaacaaccgtggtaaatattcgtgtacctccaaggactttgtaatggcaggctttaaacagacaattatttcgcacgcgccgaagatgtttcttacattcgacggtgatgcctacgatccgaacagccgactgctcacggctagccctcaggtcttcattgacgagtcgggcttcaactccaacatcatgctacacaatgagtcagaagtctacccagcctatcgcatgggtatcccttctctgattgacattgagcagacagatcaacgtagcacatcattcggttggtatggctatcagccgctcgcgcctacccgttggccaaagtctttcgtagaagtgcagcaccagtctcatcttgctctcaccgcagagcgaggttcctacactgttggcttctttgtcaacaaggcagagaaggaagacaagtggcgcgaccaagaacgcatccttgggttcaaccactacacacagacactcaacaagcgcttcatccgcaaggctgggtcgtttgacgtctacttccgtgactattgggcagctgccgaagagattcgtttcggttaccccggtggcggtgagattgtctgggttgtgcctgattggttctacggcaagaagaacttcgttgtctgtacttggaagatcacggagatcaatcctgacgtctacctcaacgaggcctatctgtacgtcaacggccatctgtatggcagctattcgacaactacggctggcactttcccatcaagcacaacaaccactccaatcgagatcgctggcgtaatcaactcttcatcatactttgaagaccgtcagacaagcgacctgcaactcgatcagatgttcatcctcaacaaagcgttgacccaggacgaaatctgtcgcttgtatagaaagtctaagtcgtacgacaacatcgcagtgcaggctcaggcatcagcatactggccaatgacagatgtggaagacccagcagtattcacgattaaggatttggcaggctacaatgacggtgtgtatcttggtggtgtgacacgcgtagcacgacagcagactgctccgagtcctatcctaggtggctcatctgtctacttccacaatggtggtatgggtgcagcacacagactgacgaacattacaacctatacgccagtgttcaacttcaatggcgattggacgattgatctttggatgcagttctcaaacacggatcgttcggtactcttctcctgtcagaaggacgactatccgcatggtggtgtgctgattgaagttaaccgccgtaacaacaccaacgtgccaggtcatatccagctctcagtgagtcaggagttctacgtttcttctcttctcaatcgagacaatggtcagcctttcaacttcaatgatggtaggttccaccacgtcgcagcagtccgaaaggggagcactgttactctctggattgacggcatcaagcacggttcggtgagtgcgcctgttcagagtctttccaacccaggtcccggtcaggtgtacttcatgggcgccgctccaggcagtctaaataccactggctacatgtctgcggttggtgtctatccttacgctctggatgatgctgagattagactgcgcaatctgtactcgttgatctatcgtatccaaggcaatgtcacactgcaaggtaacccctatcgtgctactgtgcgtgctttcagtcataggacaggcgcgttgattcgtgagatcgagtcctcgacatcttcaggtgactactcaatgacattgtatgacaactctttgattgacctgatggtcatgaacaagcaagaccctaatattcgctatcgagtctatggaccgattgcaccagctctttatgaggatgttccataatggcagttacccagtatctctacaccgacaccgacgctccagttctctacgggcagcctggggctttcatcacagtgctgaaagctgttcttgtgaacggttatggcaccaagcccggtatgggttggacgctagagtacgagtcaggaacgatcgcagtattccgtaactcgaccgctgcgggctcgacaggcatgtacctgcgagtagatgactctaactggcagtatgcgattgtcaaggcctacaagacaatgtcggacatttcgactggaactgatgctattcctggcgtcctgccttcttacagcaattcaaatatcttctggcctaagtcagcaaacaataacaacaacgctatcatgtggaacttcatcggtgacgagagaacgttctacctgaatatttgcccttggtcaagtcagaacgctaatcagtttgcgaactatgcgtatatctacgctgcgggcgattacgactcctacgttcctagctttgttcataactatttcgtagcaggaaattacgacggtggctattcatcgaatggtccttgtatgatcgacgatcagagttcctacgtatgctgtgctattggacgtgcgcaggacaatgtcgctgacaaatactccaaggcatgggtaagctacatggcaggtggtgtaccttccggatcatacaatcatcaagcgttctcagtctacacaggacagagaatcttctatcctgcatatgtgatggaaaatgctgttcagaccaatatcacaggtaagtggcgtggtttgtacggaatggtaggtcgctcaaacttcacatggaatgagaactacggcaagctcccaaacaacccgaccggtcctgatttgattcagttcacagtttccaataacagcagtcagggcgtctacatcttgaacggaggctggtaatgacaattttgattgagcctgcagtattcaagaaggaaggaacatacacttggagcgataggcgcaatcactaccttgtcatggatggcgagtttaaaaagagaccaaatgatatcggcggtctcggatacatcgcgggtatgctacctggaatcgtgacagtagacggcgcgcctgcatctagaacaattgaacttcgattccgagatggtcgtaaggaaatctttgcaagcacggtttcaaatcctgtaaacggaacctacctcattgacgacctcaacccaaagctcattgttgatctcattgcaagagagaaggaagacggagtctataacgatatcatcgtttccaagattcgtccatggacagactatcaaatgtacatccatggacctgatttccctaacgttcgaatcaagccaattttcaagcgtgtgtttgagctcaccggcggagtgatgccttatcaactcagctcagatatcactattcctgaaggaacagaagtaacgcttgatggaaggttcttgacggttaatgttactgcacctatggaaacagatctgtatatcaaggttcaggacacttcagggctttcggttgaaaagagcatcactgtcagttcctctaattcgattgtatccaagttcacaggaaattggatcctcgaaaacgaccctgtaacggacgaaccaagactgaggtcaaatcagattccgcattctggttctacctcttcgacttgggcagccgacaagaattacacacagatgtcgttccgtatgttctcatcttccgaaacaggatacgatattttctacctatatgtcaacgattcggaacgtgctcgtgttagcggtccaaatagttcctacaactacagcacgcctatcaatgctggcgatgtgattagagtcacctatgcaaaggatggtagtgcaatcagtggtaccgatgaagcatgggtgtatatcgacggcgtctaaataagacgaactcaagagaaacaacaaatggcaaactcactatacgctaaagcacgtcaacgattcctcgaaggcgcaatcaattggaacacagacacgattcgtgctcttctcgttgactcaggtaactacactgtcaacctggctacgcacgagtttgtcacctcgattccttcaggtgcacgagttgcagggccaatcaccctgacagctaagactacgactgatggtgcagccgacgcggctgacgctgtcttccctacggtctctggtgcaagtatcgaggcagtcgttctctacaaagacacaggtaccgaagctacatctcctttgatcgcttacattgacattgcatccggtcttccagtaacgccaaacagcggcgatatcaacgttgtttgggacaatggtacaaacaagatcttccgcctatgaatcatctcttcgcataccaaccatacggaccataccctttccgcggtaaggtaatgatgttgcgtcagaaccttgagcctgtgattgacccaacaatcacagtgaattggaacggatatactcaggattaccgctgtcagatgaagattgcgcctgaccagaccaagggttcttatttccattctgcaagtggttcggctgtccatagatatttcacagtcactccctcaggtctaacgctggtaaatgcaacagctgcatttgcaggcgatgttaatgactcttttgtcagcaatgattactatggttgggtagggacatcttcatcgtatatcaatgccttccgttggtcagaccacagccttatcacattgacaaagactggtctaggtacggtgtatggatgcacaatcaatccggtgaatggataccagcttgttgtcacacatagtgccacacctttcattcgttcttatgatctaagagacggttcgtatgtggatggaggggtggtgggtgctaactatcaatcttgtacctggacacctgacggtcagacggttgttgttctttcagcgtcgtctccatacgtctccaagtatagcgcgaacctagcaacaagaacaagtatttccacaaactcatcgtatggtaactcaacaagctatatgtcaggttatagctcttcatacggtcagttccgaggaattccgcattggtctaaatcaggttccgtcatcatggctccgggctccacgtccacaccattcctgtttgaggttgacactgttacaaacacagtgattccgattgctacaaatgatagcgcatatttgtatggtgctgcgtacgatcctaagaacaataaaatctacacctaccaaagccctaacggtctaacgaatagcccattcaggcgttacaacggaacaacgtatgccgaagagcctatgtcctcagcgtcatatatgatgaccggcggaaactcctcaggttgttcaactgctctgatggtagtgagttctaacactggtacgatcacaggaacagttcgagatgtcaacaacaacccggctgctcgtaagattcgcgcataccgccgttctgacggaatgcttgttgctgagacaacctcagacggaacgaccggcaactacacgatcatcactccgacttcggacactgaggcatacgacgtccagttcgttaccaacactggcgagctcttgaacgatctgttctacgcacgcaccacacctgcagcggtagcataatgccaagaaactttgtaactgtgaacggcactgtcaacattgatggtgctgctcgtaaaaaggatatcacgctgttctcttacgggaatggcgccaatcccatttacatgactaaaggtacgagcagcgcagtagacggcacgtactctatcatcggactcaaggagcgcggacagcatatccttggcttggcatcatctgattatggtcctacatggctacccggaacagcttatacggttggtcaaacggtactccctaagaccgctaacaaccactggtatacttgcacaaccgcaggtacctctgatacgattgagcctaactgggttgttggtggagacttcacaattgagtgctggttgaacagagcttcaaacaacaacatgtctgtcatctcaaagctaggccctaactacgatggatttgcttgcatcacacgcggtggtgcagtcggtttcatggtcaatgggtttgagtacaactctgctcctaatgcaactgcaagcagcacgtggtatcatgttgcctgggttatgactggaggcacaatgcgaatctatgtggatggtgccattgttgtagagcgtgctgggctgtcgattcttcctaatacctatgatgtggtcatcggggcagacaacggaacaggtgttcttgctaacttcttcaatggattcattgatagtgtccgaatcactaagggtgttgctaggtactctggtaattcattcaatgtaccaacaaaggacttcccttccttcggaccagttgatcctctgtctcctgagactaagagcctgatgcggtttgacggtgttgaaggttcaaccacctttgaagatgagaaaggctttacctggtcagctcaatccactgttgctctacagacaaaccaatacaagtttggtgggtcgtcggcatacttcaatagctcatatgcgccatggatgaaggttgattacaatgctgattttaacctcaatggtgactggacgattgagacattcttccgtcttgatggaaacacttccaatgtcacacctcacatctttgaggtaagcaatggccctggccaacgtttgaacgtctatcgagacaaccaaggcaacctgtcgttctatacagagtacaccaatggtgcttctggcgtccgtttgacctatccaatttctcctgacacatggtaccatgttgcacttgttagaagttcttcaggtgttaagatgttcgtcaacggcaacttggttggtacctacacaggtgccgttattcctgctgcctcaactgcacagatctacctcggaaactactcgttctctccaaacaccaacgacggtttgaatggttggatcgatgaattccgtttcactcgtgcagtcagatacacatcttcgttcactgttccgaccactgcatacccccgagcaggtggcgacccgtcctataacaacgtatcgtctctgatcaaattcaacgattcaatcgttgatgaaaagggtccggtttggacattcacaggtgacggcggcccgagacaatgggcgtacaagttcccacctgggtctctctaccttgttggtagtggttcgatgtctacaccaaattcagatagcctcaatctagtttccaagactagtttccctgatggcactgcaaagtggattgacagcggcgcaacggagtcacctattgcaagaggaccgttccagattcctgatcctgttgcagacacgagcacaatcttcctatctcgcaatcacgaactgcctccacaggaagagatgacagcagcaaaagctgtggtatatggtgggtgcacctcggttagcagcaagtttgccggatacaacgcgatcaagtttgatggatccacagcaggtctctattatcctgctgtggctcctggttcaggtgattggactgtcgaaggatggttctttatggatgccttgtctccatcatcttcgcaatgtgttctttacatcggagatattggtagcaacaaccatcgccttcagatgggtcctactgctgcgaatggaatcgaaggttacgtaagtgcaggtctcaatggtggtacatcttcattcgccgcatcgaatcctgtatcaggtggatctcttattcaatcaaacacttggtatcacattgcttttgaaaagtttggaaacaatacatacctgtatctgaatggaacacaggttgccacagctacccttgtagccaactactggatggttcctgcttcaaatgccaacacctatatcggtaccggtcgagttgcaagtgtaacaagattcatcaatggcagaatcggcgaagttagagtgagcaacattgcgcgctaccaaggcgtcgcaagcttccaaattccaacggcgccttacacggtttgaaacacggttaaatatctcagtctatagggctgatatcttatctgtgttgaacgcgctatctgaaaatctaaacgacgccgcaggtagcttcgatgccacttgatttcattgcgtctaatctaacccataccaaaccagtaggaactctggactttgtaagcccggaaggaatgctatttggtattgagattggtgatggtggcgagttcaagattgccggcgcacttacaggacaattcctccaagcttcttggggcggtaagcctgtctatggtcatcctgctcatgttgttgaaacaacctggggcgacaagacatacatcggtgcaggtattgcgcgtcgtggtcatgtcaacattccgaccattgttcagcaacagatcatcaagcctgccggttttgatcagtcagaattcggtgtagttcagaccaacccaacttccaagtatgttcgccctacaggtggacagatcgatacaacttggttcggtgcaagaggatactctgctcctgtaactgctgttggtgcgtcttggtctgaccagattgtaatttctcctcttgcgattgagtcgacgctcaccttcggtgatgcaaagatcgtccctgaacagaacattgaaccttccggttgggtgtcaactcaattcggtaacagctatgtcttgcattggtacgagtacgctccgccaatgtggactcttgatggttcatgggctggtaaggacgaatactttgacgctaaggatggtgtaatccatgccttgtggcgcccgcctgcagattcacagacaatcgctcctattgcattcgttgatagtgcaatgggtagtccgcgcgtacgtcaagctgtaaagcctgagggtattgcgtctactgtcaacttcggtattgcgcagctattcccttcgatctgtaataactggtcgtaccagggtgcaaccaaccgcattccgatcacgtttgacaatgttgctgaggcatacccaggcaaccgcatcccgattgagttccgttgcggatcgtcaggaattcgctactccgacttcgaaggctttatcgaagcgcgtgatggtgccgaactccaggtcaagatgtatgacggctatctgtcgctcaacatcggtgaaggtgctactctaagcccaattgatctgacgacacgagtcagcatcccgctcaacttctatgacggcgcaagttggatcggtggccgtggatgcgttgatgtatctggtctagtcaacattggctcgagcggtaacgctacaccaagcccaacactcaactctgttcgccttcagaacagtggtgatccgaccattggctcttcggttggtactcctctccttgacgtatctggtcaagacacattcgagtactcatggacacagaccctcaacggtccatggtacgacaacgactttacagatgcgttccttgagttcggtgtattcttcaaccgtcctcatagcaccatcacaacggcaaccggttactgggaatacggcactccgttcaactccaataattcaccttggctgagcttcagaatccctcgcgatcctgaaagtaaaacagtcccggtctatgcgcgcgttggcaatgagacaatcaccctccagccatttgagaagccagctggcctcgatctttttgctggtggtaaccgtcttcgtgttcgtttcctacgcaacggtctaacgcttactcttgagatctactacggcgacactctgctgtctaggcagaacccgcctgtatcctggccaacaagcgttgtccctgtttggtactaccgtaactacaacaacccatcctcgtacattgaccttgcaaacatgctgggctgtacggatggtctgctgacaacttacccagctaccaacttcaacttcggtgcaaacttctacgatggtcaatcggttgcgcttgatctgtccacgtcgacgatcctgccaatcaatagcttcgccgaagatgcttatctggctgcggtacttgatacacgtcctgtcgtaacattcccgatcaacgtctatgaaggcgcctcggtcgacctagcactcaacaccacgtctacgctacagcctgtagcatatgatggcggtgtgttcgactttgatatcaagatcaatccatctgcagacctcctgtttgcaatggcagatggtgcttcagcttcgattggtctgtcaactgcattgcagcttggcacagtcagcatgttcgaaggcgcggcagtttcagcgtcgcttgatacactcgaaaactactacatctacgatggcgcgttcgtcgaagtcggattctcgactgaaaccacgatgccaatggatggttacgccggtgagacggtacaggctacacttgatgttcgtccatcacaaggtatcggcactctcggtatctatgaaggtgcgaacgttgtcacgtcgttcactacgctgcctcaggtactgctgtatccaaatgagatcaaggatggacactcgttcaactatgacatcctcggcttcatggggattgacctcaacaatactgcttgctgcccaatcaaggacaatccagcacgtattgaactgactgctggacctgcaccagatgagcgttacgacggcgacaagactgtcttcactgctgaactgtccacactaccacgtttcagcctgaatgtctacagcggtgagcgttttgactctgttgatcctgagtacctgacgttcaacttctatgaaggctcaggtgcaatcgttgatcgtgtcgagtacagccgttacaacttcaacctgtgtgagggtaacttccttccagatggcgatcatgtcaacgtcgagcttatcgcaaccgattcgctctgtaatgactcgactctcatcttcgatggtggattcgttgatctcgacattcagaacaacgtgcagtttgctgtacctctgcctacaggtgaatacctagatgcagtggtcacaatcgacaacgcctggatcatcaacttcctccacggcgaatatgtacgtgtatcgaatcccgaattcccgctcaacttctacggtggcgaaatgtcatccgctaagtttgaagaggaagacatctacggcttctccggcgagtatgtttcggtcaacctgtccactgactacgacgttgagttccttgaagtaggctgccttgacaacgagtttgttcctgcaaacgagaacggcgaccctgattgggataagttcaatcctgttccagttgagctcgacttcttcagccactcaatcaaggctcgatgcttctaagatttctttagtaagtaaccagtaatcaaagaaaactttacaaatggctacatgtcttgaatcaattgctgcgatgggagggattggatctctgcaggagatcttccctaacactgtcatgcctttcagcgtgacatcgacggctaacaagctgtttaggctccgatcgcctcagttccagtctgttcaatttgcattcaaccttgcaggtaactcctggaacacacagatgacagtgttcagttggaacggtacaacggcgaccgcaattggttcggcgtctatcacatcagcttttgtcagcgttaccattgacttccctgtaggtgattacatcatctgccttcgaccaggaactgcaacacctcagtcgggaaccttcactgcttcattcacaggctactcgcagacagcaaatctcgtggtagatatgtttggtggcgaagagtactcatgcatcgtttctgatcctccaagaccgccacgcgagtgtaatgaggctttgttctttgaggttctcgaaggagaactcccacctggcttgcagatggattttcaaggaacaatcactggccttttgccaaacctcgattgccttgaggacacacctgcccctgctgtgaactggtactttaccgacaacgacggtacgtcatggccttggggtcgtcagtggagattcaaagtcaaggtatgggtcaatggtctgaaagacacagccttcgatgaagattggttctgtgtcaagatccacaacaactggacattcgaccttgacaacttcatggaacagagtccattccaaagagtggattatgtccgtgtcgtagagccaccgaagccactcgaggttgagtgcgcaccttgtgctcagatggaggaagtacagttcatccctcagccaattgacgctgtctgtgagccttgccaaaactctacggttgccaatcaggttgagttgattgcgatcccggttgagcttgcaggtatcgatccgaacgatgtcgtcacctggtatgacttgaacaaggacactgtcttcaccaacccataccttgagaagttccgtgatgatttgagagactcacaagttttcaagatcatcacaaactatcgagagaccaatccttacgagagcctcgagtacgctgtagcatccaactatcaaaactatctccagcttgctgagattcgtcttgatcctacaacggatccaaacaacctatctgttttgatggctcaatggcgtgactacatgaatcaatcgctgccaaccacaccaattggatacggaggagagactttcagtgtcaaccttgcctgatcaatgcgaaccgtgtcctgtaatcgagccgtttgtgcctgttgccaaactgccggacgtgctttgcccttgccctgaagaagtcgaaaagccttctattcttccaaccatcacgacacaggaagtgatcacctattgcttgaaggacgcactttacgcaatggcaacacaattattctgtgatctaaacaacggtccaaagggctgtaggtaaatattcaagatatgggactaccaacttgccgaatgacagatatgaccatgggtcacggatgctatcctccccagaaggtcttacaaggttcaccaacggttttcatcgaaggtttgccggctcacagagttggtgacgcgatccagccacattgctgtgatcactgtcaccctagctttgcggcaatgggttcctccacagtctttgtcaatggacaaccactcatgcgaatcggtgattctgcaaactgtggttccaaattgatgacaggcgcaatgacagtattggcaggctaatggctgagaacaaaatcttttccgacctagacttgaacatgatcccgaatcctcatacgggtgacctcatgcctaaggtgaatcaagaagctatcaaacgctctgtaaggcatgccttcaagttgaacgcgtatgatatcccattcaacaactcaatcaagtctagcctgaagcactatctgttcgagcagaacacccagctcacacgcgctgcgcttgagactgatctccgatggctaatgaccaaagtcgaaccgcgcatcgaagttcagacgattgatatcgttgcgcctaagaacaaagatggctttgacattaccatcacctacaagatcaagtcgatcaataccatcgactcgtttaacctgattgtcgagaaaatccgatgaaaaacttgcctgtccagtcgcttcaatttgaagacatcaagactaacttcaaggaattcttgaagggaaacgatcgatactctgacttcaactttgaagcctcaggtatcagcacgctgctcaacgtcgcgtcttaccaaactcactacattggcttcttcgtcaagatgctccttgatgaagcgttcattgactcggctcacacccgtcaggcaatgcttagccatgctaagaagtcctcatacgttccaaagggtaagcaatccgcgaaggctgaggttgttctcacgctaaccgttggaacaaacaatgagcctctgagccgtaactatccgattgaacgtggcgctactttcaaggccacaaacgatacacaggaccagcgcatcttcacggtgcttgatggttctactatctacaatcgctcggttaccggttcgactgctacctatacctcgacacctctgcgcatttatgaaggtcaattccgttcctggaacttcgtagttgacacaagcgttcagaaccagcgtttcatcctaaaggacgagatggctgacgtcgatactttccgtgtgcgcgtgaaggagaatgcatcgtcgacagtgtttgaagagtacaccattgcatctgacgtgcttgatcttgatccgacatccaaggtgttctttgtctctacagacgagaacggttattatcagatcttcttcggtaacggcgtctttggtgttcagcctgaaaacggcaacgcagttgagctgagctacatcagcacaaacggcgagactggtaacggtgctaaggcattcacctaccagaacgatattcagaatgttgtctcgacggtaacgaccaattcggtttcggctggtggtatggaaccacagacgattgaggaacttcgattcgctattccgaacgccaacaagcgtcagaatcgaatcgtcatctcgtctgactatcgtagcatcctccttgacaagttccgcaacgtcgattcgctcaacgtttggggaggtgaagagaatgtgatccgcgactacggtaaagtctatatgtccatcaagcctaaaaactcggacaagctgactgctcttagccgcacgcaaattcgtcaggatatcgtcaagaagtatggcgtggtcggtatggacgttgtgttcgttgatcccgatttcatcaacgttgacctgtcaatcactgctaagcttgatctccgtaagacgactcgctcgcagcctgaactattcaaccttatcctcgaacgtgtcaaggagtacaacgagacctacctgtccaagtttgatagcatcctttccgacgtcgatctcctgtcttacatccgacagggtgagcctgccattgtttcgatttactcttcaaagattctgtctaaggatcatcagcaccttcacaactccactgcctcgaacaatgtagtgtttggtaaccgactggtcaagggaacaatcgaatcaggtgtgatcacctatggcactgagactgtcaagttgattgatgacggtgcaggtgttcttaagttggttcgagtctctgatagctcagtgattgtagctaaatcaggatcggttgactacaccggaggagtcgtaacctatgcactgcctcaggctgctaaggttgctggctatgagacaagtacatcaggtgttcttgagttccgtgcagtcccttcggttccagacatcaacaccaacatgaacaacatcgttcgtatcgaaaccactaaggtagccgctggatgagcacactaatcccagtactcgcgcataagcttccagagtttgtgcgtgaagactatcctaatttcgtacaatatgtgcgagactatctggcctggatggaacaggacgacaacttcttgggcatcattaatgcctggaaggaaaacatggagccttcgcttcaagtcgagccttacattgatgcaatgctcactgacctcgggttcgtctcaggtcagaacctcgctgtagacaagaacctgttgatccatctgttgcaggacttctatctcagccgtggtactgaggcatcgttccgatttcttttccgaatgctgttcaatgccgacgttgagattcgctaccctcgagagcagatgctcgttccgtcattcgctgagtatggtgagcgtcatttcatcttcacctcagcgaacaacatcaacatgcttgacttccaagacctcgtactctatgtgcgtgagaatggtggtacgttgacaggactgacgactaaggtaaaggcttcgattgagaacattcagatcgtccatggctcaggaacaccatatttccgaattgagatcctccgcccgacatttgaatttcttgtcggtgaagctgtcacaatcatctcgggcgactacgctatcacggagtttgtgaagcctgttctcgcaattgaaatgaacactcctgggtctggctacaaagcaggtgaagtgattcagatcactggcgccaaactcaatggtaacgcattcatcgagagtactcgcaagggcggtgtcagtaatatccagatcgtatcatcaggtgccaactactctgtaggcgatctaattgttgctcgttctgatgatgacggtttcggtttctctgcttcggtcacacaagtcgatgctcaaggtggcatcacagggtataaggtaatcaatgaaggctacaactacgcaacacttcctaatctttatgctcagagtactgtcccagcgagccttaaggcgtcaggtggtaacgtgggtgcgatccaaactgtcaaaatggaaaacccatttgtagactttgacgccaccgatatctctatcgtaagcgctgaaggaactggtggtacattgacagctaaggctgtcagccgttgggagactcgcgaatggactgaccgaaaaggcttccttgcagagagctcaaccctgattgactctgaccgtgtgcagcagttctcatacacaatcgttagcccaatctcatcaagcctttacgacagctttgttgcagactatctacatccagtcggatttgttcgttcaagttcctacgagattgtttctaaccttggcttaaatatcacaagtggaacgcctgcaattggtactgagaccccaatcgtgtatccggcagttctaaatctcacgtttgtgtctgagtacgattcgttcgagaccatcacactcgtaacagacaccggtgacgagttcggcaccaacctatttgaaccaatcctaattgattgaggatctaagaaatggcttacagcttcacgccttctatcaaaccatatgtgatctccagcttgtacgaggccatgaagtctgctcgcccttcggctagaactccttcgacttcctactcgcttggtgcacaggtttccaacggaaataaccgctacatctgcatgcaggaaggtgttacaggtgcaggtaacggtccttccaacaccactggtgcggtctatgacggcacggttcgttggctcgcccttggtgcagacaatgtccaggatggtgacgtcatctccaacctctaccttggcgtgggcaagcagacagaatgggctaacccttctacacctgacgcaccagacacatctttgactggacagaatgaggcacttgatgacctcactgctcttatcaagattgattcttccaacctgcgacttggtctgaagaacaacacctggaccactggcacaatctactcgcagtatgatccggatgtggttacctatgctactccgaattatgctatcgttggcggcacctatgtctacaagtgcctcgataacaacaatggtatcgcatctactgacgcaccatctggcacaagcacttctctgatcgagactgcggatggctatatttggaagtatgtcggttcggtatcaggccctgagatgttcacttttggtacgaccgaattcgttcctgctcctaccgaagtcaatgttacaacagtgcagggtgagatctcgtcgttcactgatatggtatccacttcaactccgtttgctgctgctgatacgattcgcgtcgtagtacagggtaacggtacaggtgcatcaggagctgcacgttcaacaacttcgggtgcatcaaagtctttgactggtctgtatgcaaccgcaggtggttctaactacaccgaagcctatgcgatcgcatataaggatggtactccaggaacaggcgcaactctggctgcgacaattgatgcaggcaagattgatactctgaccgttagctccccaggttcggcttacacttctgcatcagtggttatcatcggtgacggcactggcgctgaagcaactgtcgttgtttcctcaggcattatcacagcagtcaacatcactgaggaaggtagcggttacacctgggcaaaggcattcatcatcccaggtacggctggcggtgttgctaaggcaaacctgtctcctccgggcggtcatggttctaatctcgacactgagctgggcatcgcgtctgttctggtttcggcacgtctttcggcgagcctgtctggatatattccaaccgagcctaccgatactgacggttcgttccgtcaggtgactctggtttcaggtgtccgtggtacaactaagaacgcactcgcctacatcggtccatcgcatccggattttgtttctggatcacaggctaaatatctcaagggcagcgggtttgttctttacatgaacaacatcgtagctatcgaacacacttcctcgcaggaagaagtgatcaagatctcaatttcgctttaaggtaaccaatggctaagcttgacctaaatcgtgctccgtatttcgacgacttcgagccgaagaaaaactttatgaaggtcctgtatcagcctgggcgtcctgttcaggctcgagaactgaatcaggtacagagcatcttccaacaccagattgaatccttcgcgaaccatatcttcaagaatggttccaaggtaagcaatgcgcgtacctccttgcagtcgaaggcttatgtccgactgaccggaacgcctgttgtttctacctatcctgagaatactcgcctgcttggtgagacctcaggcatcaccgctactctcgttcgcggtgttgacgttgaaggcgacgatccggcaactctctatgttgtctacacaggcacagcaattgacggtgagacctcggtattcatcccaggtgagaacatccgtatccttgacgtgaacagcgttgaagtcggaactgttactgtccgctgcccatcatgcccaggttccggtctgagcgatactctacctccaacaggctggggtcagttcttcaccgttgacgaaggcatcttctatttcgagggaatgttcctagatacgactcgccaagacatcatcgtggtcaagtacctcgagaagaatgtgagtggcgagatcgtcaacttctctccatgcaagatcggtctcgactttgttcagagcgtgatcacctatcaggacgacagttctcttctggatccgtcgctgggttatccaaatagcactgctccgggcgctgatcgttaccaggctaagctcgtactgaccaagcgcagctataactttgaggatggtgaaaacttcatcccactgtgccgccttggtccaggcatggtcattgagttcatgaagactgactctgagtatgctgacctgatggataccatcgcgaagcgtacctatgagactaatggtgactacaccatccgtccgttcaaggtctcgttcttcaatgctaagaagacctcggctgctgatcctctgggttggtctgtcgatggcgatgaagactcgctggtctcggttgttactccttcggttgcatacgtaaagggttaccgtgtcgagtctatctccgacacccctgtcgtattcaataaggcacgagacaccaacaagctgtcttcctttgtcaagcacttcgatggtcgcagctacatcctcggtgtgcctaagggtgcaggtatctgggcaaacgcaaacaccggtggaatgatcaccgatgcaactgtcacgatctatgatcaggctaccacaggaaatgctgctgcaggttctccgattggtaccctgaagatcagcgacgctgcctatgtctcaggaaacctcgctacaaagaacgctacctaccgttactatgtctatgacattgcaatgaacgcaggcaagaagctgtccgacgctcgctcctttgtggttgcaagctctggcttctacaccaacgcggtcattgactcggttacagagtcggttgagatctacaatgcgaaccagactgcgctgatctacaaggttgatcgtgctaacgtcaagtctctccgttccgcagaagacccactcaacggcgcaatgaacgtcgtggttcgtcgaaagctcaacggtgttgctgacggatcgggttcggtcaccttcacaacttccgctaacgaatacttcgacaacgctggttcgtcgatgcttggttggtatgttgctggtggtgtgacgacttccttcatcccaggtccgctaaccgcgttcagcccaactagcattaccgtagcgctcggttcaggcgccgccggtgcatcggtatatgtgatcatcgacgtgttgaaaacaaaccagacagagcgcacgaaaacgcctcagaatctgactgttacaaccaacactgctcctgacactgctatcggtgcagaaattgttcttggtgtgactgacgcatatcgtctgaagagtgtcaagctgtttgttgaaggttcgcctgatacaccggtggcagacatcactgacgaatacaagatcaactctaacatcactgacaccgcatatcgcgagtccaagattgttcgtaccaaggctccaagcttctcgacgaacaactcataccgccttgcgatcaacttcgattatttcgagcacagcggctcacagggcttcttcactgttgactcctatgcaccggcacttaacgctgacgactcaggagtgacctatgagactcttggtggatacactgcttcgagtggtgttgtttatcctctgtctgcttccatcgacttccgtccagacatcctgggaacaaacccagtaacatctgttctgccagctaatgaaagcaccgcaatcttcgacattgagtattacctcgcacgtactgacctccttcagatcaacaaggatggtttcatctacgtaaagaagggcgagccttcggatgatccacgtcctccgaagactgacgacaacgcgatggcactctatgagatctggctttcgccttacacctactcgttgaacgacgttcgtaccaagttcatcgagaaccgtcgctacacaatgcgtgacattggctcgctcgagaagcgaatcgagaacgttgagtactacaccactctgactctccttgagaagtcggcacaggacatgtccatcaaggacgctaatggacttgaccgattcaagaatggtctgattgcagacaacttctctgacttccaggcagccgatctgaccaacgtagagttcaaggcagcagctgaccgaaccaaggctcagctgcgaccaagcttcaagttgatgaaccgtaagctcgtgttcaatgcagctaagtcctcaggattccagctgtcaggcaacatggcacacctaccgttcactgagagcgttgcaattgagcagccttatgctaccaagcacctcagcgtcaacccatacctgcagtataaccaggctggccagatggtaatgtcgccaaacaacgacacatggtccgacacaacgatgcttccacagctcatcactaatgtcgacgccaacgttgaagcgatcaagaccattgttgaacagactcctgatcctgcaccaaaccctgttgttgaagagaaggttctggcggttgactggggtacgcacgtcgacctcaatactactgtcctaaataaggtagagactaaaccagtaactggcggtggtggacgtggcggatcgccgtggcgcaacctcaatgtcttcacccgagctaactaattaaggctagaaatggcaactgtagaatcaagaactgatacatacgatctgggcgatatggttaaggacgtccagatcgtcccttacatccgtagtcgtagcgtcgagttttacgctaccaagatgaaggcgaacactcgcgtctatgcgttctttgacggtcaagccgtttcggagttctgccgagatattggtttccagcttagcgcgtctaatgctggaactgcctcgcagcttgttgagtttggctcgccactgattacagacgcaaatggtgagctccgcggtgagttcaagattccgggcggacgtttcttcactggagagaaggagtttgtcctttcggatgacccaggactcactggcgatgcagacatgcagactacgagcgctaaggctgcttactttgctggtggcgttaatgtcacgaagcagaacgtcacacttaacgtagtttcaactgtcgtcatccctgatgcggtcaacccagcacgtgctgcacctgaacctgctccagcacctcctgctccagatccttcttgcttgaaggagatgaagaagtatcacccaaagaacttcaatgagatctgccaatgcgttgcaggtggtggaacctatggtgcctgcggtgaccctatcgcacaggcattcattgtcaacaacgatatgttcatcagctcgcttgatctgttcttcaagcaggttgacgtcttcagtgaccgtatctttgtccagattcgcgatatggtgaacggttacccaggtactaacatcatcgctcagaagtactacagcccggatcagattcagcctttcgcgtctgatgattcgagcaaggcattcaaggttgttttcgatcagcctgtgttcctcgagtcgatgacgcagtactgcttcgtcgttggtggctattcgcctaacactcgcctctgggtctcgcgccttggtgaggaagtgacgaacatgccaggaaagattgttgagcagcagacgaccactgaggtcagcttccgttcgctcaatggtacgacctggaatgcagagcagtatgagcagatcaagtatcgtctctacaaggcaaacttcactcctggaaccatgagcctcgtattcgagaacgctcatgaagatgaggaagtgatccttcctgaaaacccattccagactcagacaggtcagtcacgtgtgcgtgtgttccttcgtgatcatggactcaccacaggtgatcgtgtctcgatgagcctgaccagtgatacaccgttcacgattacgatctcggacttcgttccgcaggtcggtcagacgatgcacaccacaacaggcaagggtgtcatctcagacatcaagtcgacagctacagctaatcagtacgaagtgacactgaaggatatctccggtgtgttcactgcaggtcagacatactcgtgtgatgcaaagactcgcgaggttcgtgactggtatctcattagctccatcgacaccaagaagccagcgagctacacactcaaccagtgcttcggtaccgttgtgacaaactcgtatggcgcaaagtatccaggtggaacgattgcaggtattcctgtctccgagttcaacactgagcacgtcactggttcgctgggtcactcggttgttgaagtttgctcggttgactcgttcatcatcaacctgacaacaccagctacgatgactggtcgctttggcggaagcggaatcgtttgctataacggtggtggtaagtttgacgtgttcaacgtttctggtgcttacctgccttaccgttcctctgagaactggacgcttacaggcgttggtcatggcgacaccggaagcctgttcgaggcagctaactatcagactcaggcaccaatcgtgtttgctccacaggaagacaagttccttggtcagccgcttaagattgcttcagcaaacaacgagcagatcatgcttggtacaggaaaccgttcggtgactgtcacggcgtcgttcaactcgactgatgctaccagcactccaatggttaacatggacaccttctcggcgatcatgatttccaaccgttccgagtggcaggacaagtcgaagatgacttcgattccatacgacgctacccagcctgtatggcacgctgaggaagagattgtcaatggttccgagatctacaagtatgtgacacgtactgtcaaccttgaaaatgctgcaaacgacctctacctgtacgttgatgcctacaaggacctcaacgcagacttcgatgtctacttcaaggttcttccggtctacgcttcgggttcgattgaggcacgtccttggatcaaggcaaacgcactgaccaagtctcgttcttcagttgacacctcggatatggtcgagtataaggttgtcgcttctgagcactgcaccgcatacacctcggaaggagtcaactatgcaggttggtcagaagacccattcactgcattcaagatcaagcttgttggtcgttcgaagaactcctctaagccaatcctctttgagtcactaagagcaatcgctatcacataatggacgcaaaagtaagagactatccagaccttatcaagcgcggaggcggcgtggttaacaccaatcacgacgagtacctccgcgctaaggctcgtttgaaacaagcaaagcgcatcgacaatctagagagcgaggtaagggggcttcactcaaaactagacatcctgattggactactccagcatgatcaatctaaatgacatctcccttcgtctaatgtcgtatcaggcaactgtgcgacagacgattaccgccgttcagcaacagcagtgcagttctgacttcattgaccgtgtcagcattgccctaaataatatcgaaaatccgtctaggaacgaaacatggcaaaactcaactcgcgagaagagttcaccaactactgtctgagagctctcggtgcgcctgtaatgcgcatcaatgtagacgaccagcaggttgatgaccgaatcgaagacgccctagacctattctgggaatatcactctgatggttcggaactcgtattcctgaaggtacaggttactgagacgatgaagcagcagggttacctccagcttcctcctgagactcagtctgttctgcgcgtcatcaatgcaggctcgggtatggatggaggcggaaacggaatcgcaactatcaacctgcagtatcagcagtacatcaccgatatcatgaaccctcgccgcatcatgcaaggtgatggtctttcagcttactacatcactcaatcttacctcaacactttgaacgacacgttctctgctgaggacagaatccaattcaaccagcactacgataagctctatattcttggtgactgggatgctttgactgttggatcttggatgggcattgagtgctaccgccgtgtcatgcctgaggtttcgggcgatgtatggaacaaccgctggctcaagaagtatgctactgcacagatcaagaagcagtggggaacgaaccttgtgaagttttccaatgtccagctacctggtggtgttcaattgaatgctcaggaaatcatggatgaagcgaaggaagagattcagacgctgaagcaagaacttcacgacatgtatgaagagccaccgaatttcttcgtaggttaaatatctcgaacattaatcatttcgagaacctatcatggccttgaaccgctacttcaacactgcgaacgagaattccgaacaggaactctttgaggatctggtcatcgagatgatccagatgaacgggcaggacgttctctatattcctagagaaatctttgaggttgatcctgtccttcaggagccgaagaagactgtcttccgtcgcaacttcatcattgaggcttaccaaccggatggttacggctatccgggtgagcagaacatcatgtctaagtttggcttccgagtcaatcagactgctgacttcattatgtccaagaagcgtttcgctgagcttggaactggacgagagcgtccgatggaaggtgacctcatttatgtcggcaatccctacgatccagatttctctctgaccaacactctgtttgagatcaatcaggtatggtacaaccagcctgactggcagtttggtcgccacttcacttacaagctggtatgtgagacctggactggttctcgtgagaagttccagaccggtaagactgcacttgatacaatggagacagtgtctgatgacagcgaggagccagcacgtgtcaatgaaggcatcatctctgcgaagaccggaatcatcgttgaccagtttgatcgccacaatccattcggtgacttctaatgtcaagacctcacttctattggcagacaactaaaaagctgatcgtggcatttgctacgatctttgatgagatcgaggtcaccgatgactttggtcgaccttacaaggtacctttgattttctcccagaaagagaagttcattgaagccatctactccagtaagagtatgggcgagaccgacattgatatcacattccctcgaatgggtttcgagttggcgggtatgaactacgctcctgagcgtaacctcaacccactgaaccagattgtcgatcagatggatgacggtgaagaggtgatgacctacaaccgagtcccgtacgatctacagttcgatctctacattggtgctcgtaaactcgaggactctctaaaggtacttgaacagatcattccgttctttactcctgagctgtctgtcaccatccgtgatagagaggacttccagcttgagactgtggttcctgtcacattgaactcgacgtcggtgaatatcgactatgaaggaacctttgatacaaagcgtacgatcatgtggaccctaaacttcaccgtgaagggatactactacccggaccgtcgtgctaccaacatgatcaagcaaacgattcttaactttggtgacaaagattacgaaagaatcttctctaaatacacgagtacagtcacaccaatcgaagctggtcctaatcagattcacacggttgtggacacacatggatcacaattcgaggaataagaaatgacgtttgaagaatttctaggtgaagccatcaaaggatggaagcacgcacataacgaccttgcaaagcatcgtcgcgaacagtctcaggcaggaaatgaatggcatacgcatgcgctgaacaagtctggtaaggaaagcggcatgcacgatgctcgtaagtcgcacgcatcagaatcagctgctcgtgctcaccatgaacagttgaagaagaataacccgaactcgcatatcgcgcacaacttgtaccacaacggtaagcacgtcggaacgatgtaatgcaaaatgcccttgatgcaatctcacaatccctaggtgccgcaactcctgttgcgaccattcctcgcccatctcaagaaattgcgaaggttgatgagttcaaggaagcacctgagattgaagatgattatcaggaggctcgttctaatctgaaggaactaatcactcaggtaatggaatatgtacctgaggtagtagaactgacacgtcagtcacagtcagacaagatgatcaatgcgatggccaatctgctaaacacagcagccaatctcaacatcaacttgtctaagctgtctaaggacatcaagcaagctcctaagggtaagggagtcgttgccggctctccacaggaagaagttgctcaggtatctaatactacgaatattttcgttggttctacagaagagttcttggatatgatgatggagaaggataagcgtgctaaggaagctgcaaaggcagcccaagcagcttccgtcatcgaaggcgaatgcacaacagtagagacgtaacattccattggactcagaagagccttcggagcatatcctcacttcgttcggaattcggagactctgacgagtctcctcatagcggtcataatgtctttctgaaccttgaattttaatcacaattcggccaagctggctcaaatgatgattaagagtttaatcacaagactggtctgaccctatacaggacacggggaatcggtggcgccctattagtcaggattggtgcaattaagcaatcccgccagtccatatgccgcacagtctctgagcatatgaacacaccagttgcaaagtaagcagagctggtcaaactttaagccgtaaaggctctttgaattgtctctggtactacactcaacagactctatctcacgtcgcgactacgcttagccgacggctagttctgatctaattttgagaaacaattggtaaatattcttacagacatatggtaaatgatttcctgtggttggacaataagacttggaaacaatatgaaattcgataagacataccatggtgaaatcaatcccatggatcagtacaatggattgaacaaccttaagaaggcaggcgtcaagattcagatgactcctgaacaggctgaagagttctacaagtgctcacaggacttcgagtatttccttgagaactacgttgagattttgagccttgaccaaggcactgttccgttcgtcccgttcggctatcagcgccgtgcaatgaagaagatcgtaggcaaccgattctcaatcctgcgatggccacgacagatgggtaagactacgacagtagcagccgtcctgttgtggtacgccatcttcaacaagaagtacaacatctacgtgctggcacagcagcgtggtcaggctatggaaattcttgatcgtatcaaggaaatgtacgagtgcctgccatggtggttccagcctggtattcacacatggaacaagggttcgatccagctgggcaacaagtccaagatcgtgacagcagctaccggcggttcaggtgttcgtggtaagtcggtcaaccttctgtatcttgacgagttcgcatgggtcgataacgaccatgagttctacacagcaacctaccctgtcgtctcttcaggtgacacgtccaagatcatcatcacgtcaacgcctaacggtatgaacctgttctacaaattgtggacagaggctctgcgcggtgacaacaactatgtctgggacgatgccttgtggcatgagcatcctaagcgagacaaggcttggtatgacgagcagatggctaacatgtctgagcgtcagttcaatcaggaattcatgtgcgagttccaaggttcgtctgatacgctgctctcgccggcaactcttcagagactggtcttccagaatccgattcgtctgcttggtgatcataaggaattcaagatctatgaggatccgattcctggacacttctacgtcatcactgttgacgtctcggaaggtgtaggtaaggactactcagttgtttcggtcatcgacgtcactgaggcgccttataagcaggttgcaatgatgcgatcaaacatcatgtctccattgctgctggctgaccttgttgataagacaggtaagaagtacaacgatggctatgtgatcgttgagtcgaacacctatggtaagcaggttgttgatgccctgtggatggactacgaatatgagaacatgcttctctcccgtggtggcaacaacgatgcaaagatttcgggtgcgcgcaatgagcgtatcgcaccaggcgtcaagactacaaagaagaccaagcagatcggctgctcaacactgaagggtttgattgagtcgagtcagctcatcatcaacgactacgacactatcgaggaactcaactcgttctctaagaagggaacaagctatgaggctgagaagggcaagtacgatgacattgtgatgagccttgttatcttcgcgtggttctctgcacagccttacttcgaggacacgtttgatcagaacacgagagatcttgttcgtcaaaacatcctgcaggacgctgagtatcacactgccttcggattcatggacgacggcactgacgatggtttcgacttcggctttggcaagcagagtgaggaattgttggagactttccactaacctgagaacataaatatctcagacatattgcttacatgaagcacgatttttgatctcaggagaatatagatggcatcatctaatctaagccctggagttggtttcactgaaactgacctcaccaacattgttggttcttctggcacctcgggcggtgcatttgcgggtgactttgcgtggggaccagtcgagcagattgcgacagtgtcttcgccattggaactcgagaagacctatcacaagccagatgacaagaactacacttcttggttctctgcattcaacttcctcgcttatactggcgacctgaagattgttcgtgcggctgacgaagatgcaatcaactcttcggatgacggcaacggcttcctggtaaagaactcgaaccactttgaagttgtcaagactgctcctacaactgtgcagttcgctgcaaagtatccgggtgcactgggtgactcgatcgctgttcacatggctgacgcttcgacgttcgctggttggcagtatgcgtatctcttcgacaccgctccgggctcctcgcagtgggctgaatcccttggtgcagcgaatgacgaacttcacatcgtgatcgttgacaagcagggtaagttctcgggcgtggttggttcggtgcttgagaccttctcttacctgtcgaaggcttcggattccaaggatgcgaacaacggtcctaacttctacatcaacgtcctgaaccgtacttccaagtatgtctgggcactggctctgccaactggcgcagatctgtctgctccttcgaccggtaaggttgcttcggtaactgtcggcgcgggtggtacaggctacactgcggcaccaaccgtaacattctctctgccaccagcaggcggcgttcgtgctaccggtactgcaactgtgacggctggcgctgtaactggcgtgaccatcacaaatgcaggttccggatacgtcacggctcctactatcacattcgcaggagcgggtacaggtgcaacggcaactgcggttgttggcactgtcactgacgctgcagaatggggtactccaggtgtggttgcaggtgaagcacagaccttcaagcgccttgtcgctgtaaaggctgctcctctgaccggtggtaaggattcgactgctatcactgcaggtgacctgactcgcgcttacgatctgttctcgaaccaggaagaagtcgacgtatcgttgatcttcactggcgatgcaggtggtgagactgagcacaacgttactgtccagagtgcaatcgacaacctcgctgaatcccgtcgcgactgcgttgtgttctactcgccgcagctttcggacgttctgaacaagactcagtctgacgcagtgaacgcggttgtatcgactcgtaacctcgttggacgcgcaagctcctacgctgttatggactcaggttggaaactccagtacgacgtttacaacgacaagtaccgttggatcccgctgaacgctgacctcgcaggtctctgcgcccaggttgacagcaccaacgatccatgggtcagcccaggtggttacactcgcggtcgccttaagaacgttgtctcgctggcgttcaacccgaacaagaccagccgtgatgcgatctacaaggtcggtatcaacccagttgtcacgttcaacaccgacggaactgtcctctacggagacaagaccctgcttggtaagaactcggcattcggacagatcggtacccgtcgcctgttcatctccctggagaaggacatctcgactgctgctaagtattacctgttcgaaaccaacaacgacttcacccgcaacaacttcgtgaacatggtttcgccgaagcttgagcaggttcgcggtcgtggtggtattgaggacttccgcgttgtgtgcgatacgtcgaacaacaccgctgaggtcatcatgaaccgtcagttcgtaggctcgatcttcatcaagcctgtctactcgatcaactgggtacagctcaacttcgttgcggtccgtcaggacgtcagcttcgacgaagtggtcggtggtacattctaagaacaactactcgtagtattcttgagccccgggaaaccggggcttttcttttgcctaaatagaacgatgacaattggtaacctggcatgacatttgaagatttcctatacgaagcgtttggtgtgaacgaggtcgtgacctatggcacaaacccgacagctgacaatggcgccttctcaagacatgaaggttctattcacacctacatcctgttccgaggcaagaagtttatgatcttgttcctcacacaggacagctcaatcacattctcattggtcagcgagaagaaccttgattcgacgttgattcctcaaaaggagtctaaggatggtctcgtgttctacaacaagatcttctcggctatgaacgtggtgctcaatgctgcacacgctaagaagtttcagtttgaaggtgaaaccgacgagcttaaagacctctatagcaagttcgtgtccaaccgatcattcctcagaatgctcaaggacaaaggctggcgatatgatggagagaaatacgaaggtttgtatcttttctcgaaggtgtaaatacctacgtatacacattactaggtaattgattatggcaaatcgcagcggacaaaagacttacacttacctgttctattggtccgaacaggacaaagcatactatggttaccgaggcgcaaacaaggtatcacctgagaacgacctatggacagtctacaaaggttcatccaaggtagttgatgcctttgtccttgaatatggtgaacctgatatcgttatgatcgactcaacgtttgatagtgtggtcgaggctaaggaattcgaacgcgaaatgatcgctcaattctctatggacacttctgatcattggctgaatctgtctccttcgcacaagaactttttccatgggaagtctcacactgctgagacacggaagaagatgtctgaaactaggaagggtaaggctccgcctaataaagggatcactggcgtatacaagcagacagctgaaacaattgccaagcgcgttgcagctacaactggattgaagcgaactgaggaacagaaggctaatctaagagcagggcaagccaaatcaaaagataatcctaactattctaaggacagaagcgaccgagctaagaaggcttgggggacaaaacgtgctaacggctatgtaggtcctaacaaaggtagagtgttttctcctgaggcgagagccgcaatgagtgcaggacagaagaagcgacacaaaaactaaatacacatgattctaatagtatggttgagtccataggaatcattctcaactcaatcaaataaggagccatcaagatggcacaagcggacgtatattctttcctgagcaattttcgtggtggcggtgctcgccctaaccgttaccgcgtcaacatttccttcccgctgtctgtaggtcgcgctgttgaagcagcaaccaagatcagcttcacctgccagtcggcttcgattcctgaatccacactgggtgccattgacgtgccttacatgggtcgtcaggtaaagatcccgggtgataaggtttggggtgattggactgttcagatcctcctcgacaacgacttcctcggacgtaccgttttcgagcagtggcaggatcagctgcttggtttccgaaccaacgttgctcagccacagatgctgaatccgatcttctcgtatgcacaggcagacatcatcactctggaccgtgcagaccaggaagtacagcgttaccgcgtttacggtatcttcccaacaatggttggcgaaatccagctcggctacgaccagaacgaccagatcgctctgcagccagtgacgttcgcaatcaatggctgggaatctacagctacccgtttctaagctatgaaacgaaggacagcccagtgaaatatctgggcttttctttggattaaatatcatgtgaaaccatgaaggaactatcatgcagatttttggttacgaattcgggaagaagaaagaacctacacaagagttgaccacgttcaatatcgaccgtgagactacctctgaggtcgtcgttcctgagacctattacaatgaccatgcgggcgtcatgtctgtcccgtatgagttgctccagactcctgcggatgaagctgagcttatccgttcttaccgagaccttgcatctaccgctgaggtcgatgaagccttgcaggaaatccgaaacgaagttttcatcttcgacgttcctggtaagaaggctgttgaactagattttgtcacagagtctaagctatcagctgcgatgcgcaagaagattgctgcagagttcgatgaggtttacaagctcactgactttgatatcaacggcgcgcagtggttcgacgattggtatgtcgactccaagatctacctctacaagatggtagattacaccaagctcaaacagggtatccagaaggttcagttcattgacccactcaagattcgtcttgtccgtgtcatgcccaagcctaatccggatggaaccttcgatgctgctaaggtcaagcagttctatctgtatagcaactttgatcctaagtctcatccgctcaatcaggttattcagctccagcagggtacatcaatccaaggcattcaaattcgtccagagagcatcacctatgtgaactctggtctgtttgatcgcaaccttggtcgctttgtcggttatctgaagaagtcgattgtaccattcaacatgctgaagatgatggaagatgcaatgatcatcttccgtgtcgttcgtgcacctgcacgtcgcgccttctatgttgacgtgtctggtctgcagaagaacaaggctgaggcttacatcaaagacctcatggccaagttcaagaacaagatggtctatgactcgaagacagggcagctgtctgatcgtcgtaacatcatgaccatgttggaagactactggctgcctcgtcgtgaaggcaagtccactgaggttacgaccattgaaggtcagaactctcaggacatcatggatgaaatcgaatacctacgcgacaagttctggcgttcgctaggcgtacctcgcagccgcttcggtgaccagcagactccaaacctgtttggtaagggtaacgagatcactcgtgacgaatatcgcttcacaaagttcctgcacactctgcgctcgcgattcattcctgttctggaagacatcctacgcactaacctgctgctcaagaagatcattactgaggcagactggaacgatatcaagcgcgatatcatctggaactacactgaggacaacaccttcgttgaatcgaaggaaacggaaatcctcaacaaccgtctcaatactttaaatacaatcgatcctcatgtaggcaagtatttctccaagctgtatgttcagaagaacgttcttcgcatgtccgagaaggagatcgcagaagaagataagcagcttgcaaaggaacacgcatcaggcatccacgatgacccagatgcagaagacggcgacaatggcgcgactttcagcggtaacgctccgcctcaaggtcaggatgacggagaggaacaagagtttgcagacatccagccgggcgaaaacccatttccaacagattaaaggagccgattaatggcaattgatatcaacaaattgaacgcctacgacttcatcaaggaaatgaaaagccatatggctaacgtccttgaggagcgtctagagagtggtgaggtttgccctccgctgcctctggaagagcacgtagctaaggatacaaccgacaccgattggactgcaatgggtgaagctgaaaagaacctagtcatctcgctccgtgagaacggtcgccagcgtggttcagacgaaggtgcttatgcatctggtgtcctttggctgacattcaagaacaagaaggcttgcgaagactactgcacctacctcgaaactgccgatggcgttgacacctatgagattgaagctgtacgcgaagatctcgtgaacggttttgtcgaagatcaggaatatgacttcggtgacattatgttcgacaaggactttgagttcaacgtctacgtctatattgatgcagacctagttatgcttccggctgaagatctcgaagttggcgacgagtttgaatgggacgacgattcagacaacggtttcctgtccgaggttcgccgaaagatcaaggtaaacttccgcggtaagaagcgcatcaagatgcagtgcagccctggattcaagtgggatgcggcagctaagacctgtaagaagatctctggtgctcaggtagctgttatgcgaaaggcaatgcgccgcgcagtattgaccaagaagtcgatgggccagtcgttcaaggcacgagtcgttcgcaagacccgcaaggctaaccgcttccgtaaatcatttggactgggacgctgagatgacgtttgacgaatacctagcagagcaaaacttggctgcgatggctaatcatcacttcactaaggctaagcgccacaaagaaggcacgctgcattggcataagcacaatgcgcgtggccacgcactttgctcacaacaccacgataagaacggcgaccacaaaaaggctgccgagcatcacgccaagtgcgaagagcacattgccgctgccgaaaagatcgaagatcagaagcacggctattaagtagaagagagaacaggaaatgcaagtactagtagaacgcattgacgatgttcgtaatgaaatcctcgttgaggaagttggtggcatcaagcacaagaagtacatcatcgaaggtatcagcatccaggctgaggtaaagaaccgtaatggtcgcgtttacccaaaggaactgatcaagcctgagatcgatcgcttcattcgtgaagacattgcacttggacgtgcagtgggtcacctcaatcaccctgcaaacgatccgcgtaacgactataaggaagtgtctcacaagtatgagtcgctgactgaggacggcaacaactggatcggtcgcgcagtcgtaaccacaggcacaccaaatggtcgtatcgttgctggtctgatggatgaaggcgtgaacatgggtacgtcaactcgtgctcttggtaagaccaagatgttcgagcagcgcggtcagaagacagctgtggtgcagagctttaggctcatctccccaggtgacattgtatctgatccgtcggcaccagatgcatacctcaccaacctgatggaaggtaaggagtgggtttgggaaaatggtctcctgatggaacgtgaagtggagattaagaaggagatcaatcatgcagctcgcacaggtacactgaacgaagcgaagatgattgaactgttcaagaagttggttgctctgagcaacggacgcgaagtctgagaatttctcagaactaaataccatagaacttaaaacatcattctgaaagatcttaggagtaagtaatgaatgaacaactaaaggaacttctggagaccctagagctttcagaagaaaccgcaactcagatccagaccatcctgacagaagcatttgcagctgcaaaggaagaaggtaaggctgagggcaagaaggaagctgatgaagctgctgacaaggacaaagaagcccttgaagaagcacatcaggaagaaattgcgttcctcaaggaacaggctaatgcctacggaacccacctgaaggaaaaggctaacgcttatggcgagtcgatccaggagtccgttgttgctaaggctaaggagtatgctgagttcgcagttgatgcattcatcactgagaacaaggaacgcttcgtagaaactgaagagttcgctcgcatgaaatctgcgttcgagttcatcaaggaagcatttgagaagaatgcgttccaagttaaggaagatgctgctgtaattgagctgacagagtccctacaggaatctactgctcagtatgagtcgctcttcgaagacctctctgctgctaaggaagagcttgcacagctgaaccgtactctgattctggagcgcgcaactgctgatctggctgagactcagaaggagaaggtaaatgaattgcttgaggctgtctcgttcgattctttggatgagtacaaggacggcgtagcaatgatcgttgagcaggctaaggctgtggctgccccagcacaggttgcacctctcgccgacaccccggaagtgctcaacgagcaagcgaccccggctaagaaggaagtcaaccaggatgtcaagcgcctgatgggcaagggccttctgtaagttgaattcccagaacataaatatctgagaattgtttaattcgtatttgagatttttaggagaacaaaagatgtctcaagaagaaaataaagtggataccctcctagagaagtgggaaccagttcttgaaagcgaaaaggcagatgcaattactgacccgtatcgcaagaaggtaactgctcagcttctggagaacacacaggaagcactgaacgaagcttcgaacctgaccgccggcgtgcagaactgggaccctgtcctgatctccatggtccgccgtatggctcctaagctgatcgcatatgacatcctcggtgtgcagccaatgaccgctccgtcgggtctgatctttgcactgaaggcacgtcgtgctgctaccccaccgaacactggtcctcaggctggtgcagaaatccttggtctgcaggaagctgatacttcgtactccggtaccggtactcacgctgcaatcactgatgcaaacttcctgactggtttcgcgaccggtactggtaaggtcacatcggctggtgaagtggatccatggaactcggtcggcgtcaccatcgacaaggtcaacatctcggcagttacccgtcagctgcgtgcagactactccattgagcttgctcaggacatgaagcgcgtacacggtctggatgcagatgctgagcttgttcagatcctcagcaacgaactgatctccgaaatcaaccgtcaggttgttcgtacggtctacaacgctgctaaggtcggtgcgcagtttgcttcgtccccaggtaccttcgacctgaatgctgacgctgacggacgttggtctgttgagcgcttcaagggtctgctgttcgcaatcgagcgcgacgctaacgcgatcgcaatcgagtcccgtcgtggtaagggtaacttcctgatcgtctcgtccgacgttgcttcggcactcgcgatggcaggcgttctggactacgctccagcccttcagggtcaggtttcgctcgaagtcgacgcaaccggtgcaacttatgccggtaccgcaggtcgcttcaaggtctacatcgatccgtacctcggtaccgatgcatacctggtcggcttcaagggttcgactcagtacgacgcaggtctgtactacgcgccatacattcctctggaactgcaccgcgctaccgacccaagcaacttccacgctgctctgggcttcaagacccgttatgcaatggcagagaacccattcgtgggcaactcgaccagcatcggttcgaacgcgaactactactaccgcaaggccctcgtcaagaacctcatgtaacagtgaggtccttacaggacacggttgtaaagttttcagacaagacccgctcacaaggcgggttttgttttggttgaatttctaggcatctacaatcgtacatctctatgatgcatctttctggactgttaaaatgctcttgaaccagatgggtagcaaatagaaagaaagttagaaagaaaataaagaaaggagtatagatgccaccgaggtgtcgtgcccgaggctaaaagattcggcatgtagtacatagacacacgtggtaggtgtagcttttaagcaagaaagtgagatcccttgatactactaggtttcagtagatgaaggggtaattttgaaaagccgtagaacccttgatattactaggagttgcgtatgcagttttattcttcaatgaccttggcagactttgtagcagccaattggacactgatggaccctaatgtggttagcctcattgaacgagaagcagatcgtcttgctgagttggaagaagatgtgatctcgtggaaggcaatttcggaagacattgttgatgccaatgaagacaatcgtgattacattctcaatcgaattgaagacatcaagaaaggttcctacactctaaatgagcttgaagagttcgttcgtcacatggatacatcagtatgatcagactcattggactaacaggtaaggcaggaacaggcaaggacacctttgcaggtttcatcaacaaggccatcaattttgaaccgtattcgtttgcaggtccactcaaggatgcttgctgcggactgttcggatggactcgtcatcagattgatcatgacagagagttcaaagaggcaatcgatcctcgctggggtttcagtccgcgtcgcgcaatgcagttgatgggaacagagtatggacgtcagatgcttcgtgatgacatttggattcacatggctaagatcaggcttgatgaaactcgtaaggcaggtctgctcgttgtggacgttcgttttgagaacgaagcatcatggatcagagacaatggtgggttgctcatccacattgaacgtccgggagcaaagtctgtggctgcacacgcttctgaggcaggtgttgcctttgaagatggagacctggttgtcaccaactccggatcattggatgctctccagatcattgcacagaacatcgtgaccaacctgagattgaccgattaaatactggcatgaccagtaaaacaatcaatcgaaatccagcgatcaacaccagctataagctcgagattccgggctttgattcgctgaactactttgtgcagtcaaccgaaatcccgtctctatcttcgggtggtgttgaaaccgcatatcaaaactggggtacgaacgtccccagtaacagaatcgagtttgatcctctgaacgtcaacttcttggtgtcagaggatctaatgaactaccaatcgctctatgagtggatgattcagatcaccatgactgagcctgtagttcctgagatgatgaagaacattgttctgcacatcaccaactcgtctcgtaatcataagatgcagattcgattccataaggcatatccgaccatgttgggttctatcccatttgattcaggtgtcaatgatgtgaatcctctgctctgttccgcaacattccgttatcaatactttgagattattcgcgatgcgtctggacgaacttcaagctgagattgccgttgactctgcaatcaataataatgccctggatacggaatccctgaggattccaatgttgcactcgaagtactacaactacttccttacagagcttcgtattctgaaaggcatcgagattgaatataagcgtgtgaagaaagaacgccaccagtattggctgggacaggcgagtgatgaagtctacaaggctgagcctaaagacatcaaaatcctcaggcaagaccttgaactgtacctcgatgcagatgagaagttgactgagctgaaatcgaaatatgagatgcaaaagatgaagactgagatgctcgaagccttcatcaagacattgaacacaagaaacttcctaatcaagaactcaattgaattcctccggttcaagaacggcggatgacataggcacgaagaatgcaagcagatatcaaacttcactataagaacgaattacacgtcaccctggactgccctgttggcgtctcctatgaagtgtctgaggcgtttgcattcttcgtcaatggttacaagttcatgcctgcgttcaaggcaggtcgttgggatggtaaggttcgcctttacaacatcaaggaccgcaacttctacattggtctgctgccaaagctctttgaatgggctgaggaaaacggctacaccattgaatacgcgaacccgaaagacttcgagcgccagtacccaaccatcaatgaagagtcttggaacgagctgaagaagtgcggcaagtttgagcctaagtggtatcagaaggaagctgtcttcagggcaatcaatgagtctaagactctgatcctgtcgccaacaggctcgggtaaatcttacattcagtatctgatcacgcgttacctgcttgatcacactgatggtaaggtcctgatgacggttccatcgacgtcgcttgttgaacagatgttctctgacttcaaggactatgtagctgacgattgggacgttgaagagaacgttcaccgtatctactctggtaaggagaagtacacagaacaccgagtcgtcatctcgacctggcagtctgcgatcaagctacctaaggcatggttccagtctttctctgcctacatctgtgacgaggcgcatggtgcagatgcgaagagcatctcgcagatcattgaccagcttggtcatgctcagttccgccttggactgacaggtactctggatggtactaagatgcacgagcttgacatgcaggctcgattcggttccattgtgcgcgttgcctctacaaaggacctgcaggatgaaggttctctggctccgttgaacattgagtgcttccagctgcgatacagcaaggatgatatcgctctcgtgaagaacatggactacgatggcgagatcaagttcttggtcagtcatccgaagcgcaactatctgctcgcaaagactgcattgacgcagaagggtaacaccttgatgctgttcaactatgttgcgaagcatggaaaggtgctctacgagttgatgaagccaatgtgcgagaagtacggaaagaatctgtacttcatctcaggctcaactgctgttgatgaccgcgaacagattcgtcagattctggagaaggaaaacaacgccatcctactcgcatcgtatggtacgcttgcggtaggtgtcaacgtcaagaacctgcacaatctgatcttctgtcacccgatcaaagccgtcatccgaacccttcagtcgattggacgaatccttcgaacggcagaagggaaacaagatgtaaaactcattgatatcgcggacgatttatcctatactacacgcagtggggtaaaaaagcagaacacaattctgcgccacttcctagaaaggctcaaaatctacgtaggcgagaaatggaagtacaaaatcataccgatcaagatgggcgagtaagcgaaaactcagctgtagatttggtaaaggtcgaatcgggtaaggcatatccgattcggctaatgcacttcccaaacggtttgaatgtcattggttatgtgattgcagtcttcccagagactacgatggttctgcgaccctatacggtcacagttgattacaatgcacatacagataatgtcgaaggatatgagttcagtcctttcctggatcagatggcatatttcaatccactggatttgacgccggttcccttcatgaacaatcagatgatcgccattgtgcgcccatcagaacatgtggtgagcaattacaccggcgtgatcaggttgagagaaaagattgcatctacccctgacgatgaacactttgagatcctagtatctcgagaggttcctgatagtaagacacttcactaatacggcattttcagcattgaccgaagacaagaagaaagcaaatcactatgtagacaagcaggcgctctacgctgacctgtgtgaatggaagattcggaaagacacggcaatcgctgaaggcaggaaggcaccacccctaccagattcggttggcgatgctatcatgaaggtagctgagggtcaggcatcacgtccaaacttccgtaactatacctatatcgaagagatgaagggcgaaggcatcatcgcagccgttcgcgccatgaactccttcgatccaaagcgcctcggtaagaacggtgaggttaacccgttcggattcatttccctgtgcgtatggcgagcattcttaggctacattgcctacgagaagaagctccaaaagactaagatggatatgatgactgatcccgtcaacgagttcttctcgacgatggatggcgatcacggtcactacatcgacaactacgacgtcgttgaattcatgagccactgaggtaatcatatgaagattgcaatgattaccgatcagcactttggtgttcgcaatggctccaagttcttcttggacaactacgagaagttctacaatgagatcttcttcccgactatcgacgaactaggcatcactcacctctggatgctcggtgacttttgggaataccgcactcgtattgatgtggttactctgtggcgcgctcaagagatcttccttgaccgccttgaggaacgtggcattcaagtaaccatcatctatggtaaccacgacgtcgcctacaagaatcgaaacgacatcaactcgatcgacttcttggcgaagatgtacaagaacatccatgtggtcaagacacacgagacgattgagtttgatgggactcctgtcaacttcctgagctgggtgaacaactccaacctggcagatagtctcgagttcatcaagaactgtccgcctaccatcctgtgtggtcactttgagatcaagtcgtttgaaatgatcaagggtcacgtatgtgaacacggcttcgacaagagcctgtttgatcgctttgatcaggtctattcaggccacttccacacggtctctaccgacggtcgaatcttctacatctcaaatccatctcagaccaattggtccgactacggtctagacaaaggtttccgaatctttgacacgaccactcgagagttggaatttgttccaaatccgtttgatgtctactccaagatcgcctataatgacgacattgatatcgtagagtttgactacgatggatatgccgataagatcgttcgtgtctatgtgcagtcttactcttcaacaaaccagcacaagttgagtctgttcctcgagaagttgaacaaggttgtctatagcgcagacctgatcgagatcgacgagactcaattcaatagcgagactggtgacctgcaattcgtagacaaccatgagctgattgagaaatacatcgaagaggttgttcagagcccaaccattgacaagaacgtcctcaaaggcatgttcaaggaaatgtaccgtgaggcactggatatggcagagacagaatgacaacttatgtagatgaaatgagaacagagcttcttggatatgccgctcttgatcctgaaatccttgcattcatgcgcaagcatttgcctaggatcatcgctgaagaacttgtaggtgtccaaccaatggatgaaggtggcaaggcctttgaggagctctatcagcatcttaaagcgactaacaaagcctttgtcttttcgagcaattttgaatgatctattttcgtaaactgagattcaagaatatcttgtccttcggcgacgttatgaccgaagtacagctggatcgctcaccatcaacaatggtcatcggaaagaatggtgtcggtaagagttcgctcttgctggacaccctcgcctttggtctgtttggtaagcctttccgcaagatcaagaaagagcatctgatcaacactaagaatggtagagatgctctggttgagattgagtttgacaaggatggcaagagctaccttgttcgccgaggcatcaagcctggcatttttgagatcttcgaggacggtaagctcctgaatcaggaagccaacaaccgcgactatcagaagatcttcgagcagcaaatcctctgtatgaactacgacgctgcctgtcagatcattctggtcggtaaggctcagcacacgatgttcatgcagctcaacactggcgaacgtcgcaagtttgttgaggttgtgctgaacctgatcgtgttctcaaacatggcacgtctgcacaatgcaaagacgaccgagcttcgtaaccgcatcggtgaactcaagactgcaatcactgtcgcagcagagaagatcaagatccgtaagaagtatattgatgacctcaagaacgctgataagcaaaatgcagcagcagaacttgaacgtatcaatgctcagattgacgagatcactgctcagttgaccgagctacatgcgcgtaagagcgagattgaaacggtcgaaggtattgacagggatgcctataagaaggcgatgaatcatctgtctgagcactccaagatgatcgtcaagctggacacttctctgtctcagattgagaacagtctgcgccagttgaacaagtctcaggattgccctacctgtcatcgtcctctagaacatgaggatcatgctaagcaagtcgatcaccttacagataagaaagccaagatcgatctggcaaagatggagctgtctgttcgcattcagcaatttgagtcggtcgtggctgaattcgaggttgcggttgctaagtacgacgcctacatcgacaaggttcgctcggttgacatgcagattgcatcggctgaatccaagcgagacttcctggtcgctgagacaaagaaggaacgtcacagtcaggcagacaagatcaaggaagcaaacggcgagttgaaaaagctcgaggacatgcacaccgctctggtagacaagctggaacagctttatactaagagtgattacatgagcctgattggaacgatgctgcaggacaagggcattaagacaatgctgatcaagcgcttcattccgatcatcaaccacgaggtcaacactcacctcaatcacctcggtctgttcgtcaacttccatctggatgaaaactttgacgaaacgatcaaggcacgaggctttgacaccctcgggtacaattcgttctcagaaggtgagaagctgcgcatggatatggcgcttctgatggcatggcgcgatatcgcacgaatgcagggcaacgttgcaacaaacatccttatctttgacgagatctttgacagctcacttgaccaaggcggcgctgacgcattggcagacatgcttgcactggtgaaggacttgaacgtcttcatcgtcacgcacactccagagaagatcattgacaaagtccgttcaaccatgaagatcgagaaagtcgacgggtttagtagaatcgtatgagcacattctttcaacagttcttcgaggacacctgtaaaaacgtccttagcaatcatctcggcgagttgtcggatgaggtaacatatcaagagatccgtattgatctagccgaatatgctagactcacgggagtccaaattgttatgaaggtcgttggaccaaggcacctgaacttctctacatggagtcaggacgttcagtatttctatgactaccaatggtaaaagatcatgagtaagcgtttgacccagtacttctatctgtacgaactcggtgagaacaccatcaccgagcgcatcacattctttgagggcgaacgtcccgaggctcttgccattcccggttggaaggggtggttggacgagttggtccatgcaggtgaagctgcattttgatacatgcctgaggttacatgttgcctcagtcacctacctgttagtataagcacatattgttcacttaggagttgtaaattatgagtttgtcatctgaaactttgaatgttctgaagaactttgcctcgatcaaccagggtctcctgttcaagccaggcaatcgtcttcgtactctgtccgttctgaagaacgtgttcgctgtcgctgaaatcaacgacgagattactcgcgagttcgctatctacgacctcaacgagttcctgggcacgatcagcctgttctccaagccgcacctgaccttcaatgaagatcacatcctgattcaggacggcaagaccaaggtcaagtacttctatagctcgccggcagttgttgtctcgccgccggacaaggatatcgtgctgaccgatccgctgctgaccttcgaactgaccgaaggcaacatcaaccagattcagaaggctgcggctactctgaaactgaaggaactgtcgatccgcgaaggcaagctgaccgcactcaactcgggtggcgttggcaatcagatcaccattgagctggataccgaaggcaagatgagcgacgagaagctcgtcaagatcgagaacctgaagctcatcgaaggttcgtacaatgtcaaggtcttcgagcaggcagttgagttcagccacatgaccaagccgggtctcgtctacctggtcaccgtcgaggccaagtaagatgacggccatcttcgggaacattctcgatcaggcgctggagctaaacctccagcgccaggccatcaatgctaactaccgacacaacttcgagccacatatgtggatgcgcgagttctgtacggttcgcctgcagatcggtcgtggttgtggtcacacaatggcaatccgctctcgttctaagcgagatgatttggtgattgttccgtcgtcattccacatcatgacgatgtctgagaatcgagttgagaagcctactgtcatttcctcgacagacccgaacgccattgtccttcgcggaaagactttcaagcgaatctgggttgatgatgcttcgattcgttctgatggtgatattcggaatgtgtatgtgattgcattgatgcatcgtgccgaacaaattatccttgtaggctgatttaacaactgtgagatattgataatgagtgacgagaaagaaatgtacctgtggagtgagaactatcgtccgcacactgtgaatgactgtattcttcctccacgtttgaagacctacttccaggcaattgtggataagggacaactggccaatatgacgttggttggtggaccgggtacaggtaagaccaccgtcgcacgtgcgatgtgtgaagagctgaaaatcgatcatatcgtcatcaacgcgtctgagaacggcaacattgagacgattcgtactacggtacgacagtttgcatcgacggtcagcttcggaggtggcatcaaggccatcatcctggacgaggcggacggtctgacaaagaatgctcagcaagctctgcgcgcctcgattgaagagtttgcaggcaactgccgcttcatctttaccggcaacttcggtaatcagattatcgagcctctgaccagccgagcacctatcgttgagatcgtcttctcgaaggaagagaagaaggctctgctgatggagttcttgaagaaggttgcaggtgtccttaagtcgaagggtatcgcattcactcctgaagaactgactcaggttatcgtcaagaatttccctgacttccgtaagacttggaacctgatccagcgttattcggctaacggttcactcgagattacgagtcagactggtatcaatgatggtgctctgaaagaactgattgattacctaaagggtaagaagtttggcgacatgcgcaagtgggtcgttgatcacctcgacaatgatgcagcatctctgcgtcgcagcctgtatgaaaagatggctgtctttgtcaagcctcagagcattcctcagctggttctgatcatcgcagagtacgactataaggaaggtcacgtcatggacaaggaaatcaacaccgttgcgatgttgactaccatgatggcggacgttgaattcgtataaatatctaggaggtaacaatggcatctatgagtccatttgatatcgcctcgcacatcaacgagaagaaaggtgtgctggatgttgaagaaattggctatagttcgtacgtagtcaacaaggtactgtcgaatacaattgatagtgtcttgttcgcgaatgagatgaatcgttactggggacttccaacccaggcgcaatttgacttctattaccatggtctgccgaagaagaagcgtttcggcaagtggcacaagaatcaggacgacaccgcgtcgctcgatctaattcaggaatactacggatatagtcggaaacgagccaaagatgtgctcggacttcttcgaccttatcttgatgacattcgcaaagaattagaaaaaggtggcaaaaatgtcgcaaaacagaaagcaggaacttcttgagtccttctttgaaattgaacctttgaacaaggatcagtttctaaaggtacgtgaaactttgacccgtattgggttgccgagcaagcgcaatggtgatcagactctttggcagacatgccacgtcttccataagcaaggtcgttactacatcgtccatttcaagcagctgttcctgctcgatggtcgaacagatgtaaccgactttaccgatgaagatgaagatcgtctggagttcatcgtaaacttgcttgagcagtggggtttggtcacatcactggttgaagttgacgccagagttgaatcaaacgtaatgattatcccttatcgcgataagcataagtggagccttcgtgtgaaatactccttgggaaatactgataatggcgagagctaagaaagaagagcaggtcactgacctgggcgcgctggatatgtccagcgtagctgtcatcggacagattgcatcgttcgaagatgacaacgttggcttctatcagaagcgcaacaagaccattcctgattatgcgacagagttctcggcaggctttgacctgagcgttgacattgaagcaggtgacgtaatcaacaagtacgatcatcgtaatcagaaggttgagatcactgctcgtggacaggacaacgctccggcgagactgtatctggagccaggtgatcgtgctctggttccgaccggcttgcacgcggatatcccggaaggctactacatcgcgattcatgcgcgtagtggaacttcctggaagcagggtctgattctgacaaatggcgtcgcagtgattgacgcagactacgtgggcgagatcttcatctcggtcaccaataacagtggcaccagggtagtcctagaagacggtgagcgcattgctcaggggctgctaatgcccgctgtcaaggcacccttcaagaggcttgacactaagccagcacaaaaaactagccgcgcaggtggctttggatcaacagggagcaagtaatgagcgatatcaagttggtatggaccactcacggtcagatcctcggtgaagtcaccgccaagggcgatggttacgaagtagagaatccggtattcatttcgccgggtgggcagggtgtcagcatgctgcctgtgaacatgttctccgatgaaacgaagatcactctgacgaaagaggaccttcgcttcggtggtcacctgttcgagccgatcactgagctgcgcaacgcgtatactcagcagttcggatcagggattcagcttctgagctgagtcggctgaaacgccatatctcgccgagatcagcttgctaacacttgctgatccggcgatgacgcctagataggcaagccagataaactcaagtgatgctgccgctggcgcagtgatattgatgaataggaacgcgatggtcgccacaaaacaggcaacgacgttccagaattttgtagatgacacggtcagggtgcccggctcgtagaacatagagctgaggtcaagtttcctgattgccttgaacaagacataagcaatcattagcatgaagactagtgctgcacatgaggcagcaaacaggaagccgttggttccaatggctagccatgctagaaatgaggagagtaaagacataatggcgttctataccttttgcgattcgattggaagtaagatttaccacaggtatgtggacgatgccggaaaacgccatcaagaaattgttacaagttttcctatcgagctatttatcaaaggcaatggagaatacaagtcgctctatggtgaccgcctcagccgcatgacctttgatacgatttcggatgccaaagacttcatcaagaagtacgaaggtactgtgcctgtctttggacagacttcgatgcatcaccagttcatctctcatcgttaccctgagaagattgaattgcagtttgacaagtatcgcgttctcaacttcgatatcgaaacccgattcgacggtaaggacgatgaagatgaggtgttggttcgtaaggtgttcagtcttgaagaagagaccgtcaccgttggttacatgaagactctccaggacgtttgggaagtctatgatccgatcaacgagcgttggtatcctgcatctaaggcacctcagcgcaatccaggtggcttccctgacgcacagaatgcagcatacgagatcacgtcgatctcctgcaaggtgtttggtcgtcctcagaaggtgaccttcggtacgaaggaatatgaggtcaaggataagaatcagatctacaatctgtgtgcagacgagcgcgagcttctgcagcggttcattgactttgttcgtttggttgacccagatgcaatcactggttggaacattgagtcgttcgacgttccctacatcgtgaatcgctgtcgtgctctgttgggtgagaagctgacgaacaagctgagtccgttccatgctcacactgatcgttgcattcaggactactggattgatgacgacaagactgagaagggatatcgcatcttcggcgtgaccactcttgattacatggacatgtataagggttacaaccctgtcaagcgagacagttacgcactggacttcatctctgaggttgagctgaaagagaagaagctggattactctgagtacggcgacctgatggggctgtatcgtcagaactacgaaaagttcattgattacaacgaacgagacgtttacctcgttgagcgacttgatcagaagaagcagttcgttcgacttgtgatcaccaccgtcttgatgactaagagtcgatatcaggaaaaggacggtaaggtaaagctgtgggacaatctgatctacaatctgctcaaggcagagaacatcgtcattcctccggcagttcagaagcacggtcgtagcatcattggcgcatatgtcaaggagcctgtgcctggcaagtaccgttgggtatcttcgctcgacttgacctcgctgtatccttcgatctgtatgatgttcaacatgagccctgaaactctggttcgtgaagagcaaggtcagctggattgggttgagcgtctgttgaagggcgaagacctggctgcggattgccgagctcagggttgggcgatggcagcaaacggctcggcgtatcgacaggatgtgatgggcgtcatgccgaagggtatgaagttcgtattcgatactcgtaaggctgagaagaatcgaatgctcgaccttaagcgcgagaaggaagcatatcttgcggctggtggcacggaaggctcggaagagtatctgcgtctcgataacctgattgcagcggcagacgcaactcagggtgcgatgaaggttctggctaactcgggttacggtgcatcggcgaacaagggcttccgttacttcaacgtgagcatcgcggaaggcatcacattgaccggtcagctgggcatccagtacatcggcaacatgatgaacaagtacctcaacaagaagtttggtacggagaaggattatgtgatcacatccgacaccgactcggcttacatccagttggagaacctgccttcggatccgaagaacattcagaagtcggttgatgagattgacgagtttctcgagaaggagttcacaccgttcatcaatgcagcatatcagaagctgtctgatcgacttggcgcaaagaagaacctgcttgatatgaagcgagaagcaatcgcagacgtcggcatcttccgaggcaagaagaactatgttctgcgcgtatgggacaacgaacacgttcgttaccatgagccagttctgaagatgaccggtatcgagactgctcgaagcgacaagccgatgatggttcgtaagaagctcgagagtgacctagagatcctcctgacaggaactcaggaacagttgcttacttccattgatagtttcaagaaggagttttataatgctcctattgagaacattgcttcgccgaagggtgtaaaggatctgacgaagtggattggtgacagcggtgaacttttgccgaaggctccatatcacgttcgtgcagcatacgcgcacaacaccttgatcattgagaagggtctgcaaaagactgtcgagagaatcaagaacggcaacaaggtgaggctgatggcgctcaaggcaattaacccttgccgatgcagcaacatcgcattcaatggcactctgcctgaaggtttcgatcttcacgagtacctcgacaaggacaagcaatggaatgctacgtacatcactcctttgaagtccttcactgaaatcctcggatggaagactgaaaaggtcagctctcttgaaagcctattcggctgaggggtttaagtatgagtgcagctagcgagatgttgaaactgttggccagtttgcagaacgaactggtcatggttgacattgacccggaaatggctgagtttgcggaacacgaaaagatccttgatgttttccgacagactgtagcatcaattgaacacatctatcctatggtgcaggctgtcgaagaagtcctcgactggtctatcactccagctctcttctatcacaaatggaagagagcagctgctcacatgggtgtcgatgacgacattggtgaagaagatatcggtccagacgttcgaggactactcgatcggtttagcgacgataatgacgatgaagacgaaggagaagaaagttgagtttggttgataaattgatgaagcagtctacgattaaagagactgcatcgctggagaatagcaccttcttccagaaaaaagaactggtgcagacaaagattcctgtcctcaaccttcttcagtcgggtgagcttgatggtggttttggtcctggtctgaccatctgggcaggtccatccaagcacttcaagaccagctttgtgctgacgaacatgaaggcgttccttgacaagtacaaggatggtgtggttctgttctacgattcggagttcggtactcctcagagttacttctcgtccttcggtattccgctggatcgcgttgttcatactccgattaccaacatcgaggtgctcaagttcgacctgatgcagcagttggatggtctgaaccgtggcgataaggtgttcatcgcgattgactcggttggtaacctggcttccaagaaggaagtagaagacgccctggaaggcaagtcggttgcagacatgacccgcgcaaaggcattcaagtctctgttccgtatggtcactccggtgctgtcccttaagggtctctgtatgcacgtcgtggctcacacctacgatacgatggagatgtatgcgaagaaggtcgtgtccggtggtacaggtcttatctactcggcagacaacatctatatcgttggtcgtcagcagaacaaggatggtcaggaagtcgttggttacaacttcgttctgaacgttgagaagtctcgctatgtccgagagaagagcaagattccggtcgaggtaacgttcgagaacggtatttcgccttggtctggtctgctcgaccttgcacttgaaaccggtcacgttgtgaagccatccaatggttggtaccaacaggctggcactgaaaagaagctccgtcttgctgatacgaacaatgctgcattctgggttccgatccttaccaagacagactttggtgcaaagctcaaggaacacttccagcttgctcagactgaaatgatcaaggctggaacgatcgattacgaaactggcgaagtgattgaagaataatggttaagaaggttctaccaacaacgacgaactggctctatgctaaggagcctatgctcggagcgccaaccattgcgaacatcacgcaatggttgcgtaagaacaagctgacggttgtccaaaaaggtcgtcgtttgacagtgaaccatcgagccaacgtagagcctgtccgcctcgctgacgaaattcagttgaggctggaaggctctcgtcgaatctcaaaccttgctgtgaacgtcaatggtattgctatcgtcgtatcggctagcctgaaaggtaacgctggtgaggacaatgaagaatacttgatgcaccgtgtcaatcgactcgtcggttggctcggtggacctgttgacgtgaccttcaaatcaaagaagaaagcgtttgagatcaaaggtgttgttgaagtctatctgtcaggacgcgatacgtctggacataagaaagccgacgttgagttttggactaagagcgggaagatgattcctgtatcattgaagcaaggcaacgcttcattcttctcttcggctgactcggagctcaaggaaattgctgaggcttcggtgcgatacgcatttgagaacgccttgaccaattttgaaatggatcctgcaacaaagatcaggaagatcaaccctgaccttgtgattgaacctacagataaggaaaaggaatttgcccttttcggaaatgacatcttgaaaggtaaaggtgctatcattagacagtcattcaccatgaatgatttcttccaagatgtgcccaacaagctgttcattcacgtcgaagacatctggcaagaacttcgtgatgtgccagagattgaacagcctgtaattcagatcagaaacgacaaagatagaaaccgaagccacccactgctcaaaggtctacgtgcgctgacaatcaaacgtgctgtagttcctaagaatgctagatggatcgaccgtgagaaactaaaataatggaactctacgtaaaagaagcccgcgaagactaccttgaagtcatcgacttgaaacacccgcagtaccttttcatcttcgatggcattcatgttgggaccaacaatggcaagctagaggtccttgtaaataaagcgtcggtacagaaatccgacaaagcggaagagtctaaccccgatgcaattgtcgcggatgaagatgaattccttagtacacataccgaactaatcatcaacgaactgttccgtggtccagttgaaacggcacttggttgatattatcatataggaaatcgtaaaggaaagtaacatgcagaaagaaaaaaccaatccagaactcggtcagcgcgttcacaagcacctcgtcagcctcggcattgaaacgccaatcactgagctggtgaatgtcccgagcaaagagaagatcgcgaagatcgaagagttccagcgccagtcgttgctcactctgggtcttgatctgaccgacgactctctgatcgaaactccgaagcgcatcgcaaagatgtacgttgaggaactgttctacggtctggattacaacaacttcccgaagtgcacagaagttgataacaagattgaatacgatgagatggtgattgagcgttgctcggtcaagtctgtctgtgaacatcacctcgtctactttggtactgctcaccgtcccgatctgtcttgctgggtgtcttacatgccaggtgagaaggttctgggtctgtcgaagctgtctcgcatcgtagacttcttcagccgtcgtccacagattcaggaacgcctgactgtgcagattgctgagaccatcaagttcatcactggcacggaagacgttgctgttgtgatgaagggtcagcacttctgcgtactgactcgtggtgttgaggattccgatggcgtgaccatcacctctagcctgagtggttcgttccgtaccgatcctacgctgcgatcggaaatgatgtctttgatcaagggttgatatgagcgagcacctgaaagaacttgaaagagtagccattgaaaggctggttgagtacggtgatcctaagggtgtgtatgttgcgacgagcggcggaaaggattccgtcgtcgtccatcatctggctcgaaaggtgttcggtgatcaggttcatttgattcacacacctaaggtgaccggtttcaacaaggtacatcctgcgactgtagcattcctctatgagcagagtgcgaaatatggtctcaacatcgttccatttgaacgtatgcaggagtatctggataccaacaagctttggatccaaattgacggcactcgccgttccgagtttgatcggaccgatcgcagtgcagacgtcgtagtgaatggtaagttgatcagccgagcggacatgcctgttcatacggttggcggcttgtttggcaatgaatcaattttccctattgtggattggagtgatgatgatgtatgggcatatattggacagcaaggtattgaagtcaccgaggaatatcgtattctcgccacacgttgatgatgaagtgatcgggtgctttgaagcgcttgatcgaggtctgatcacagacgttgtctacttccacgatgtcactcctgagcgtaagatcgaagctctgaaaactgctgagatgtttggcttcactccgcatttctgtgattatgattggtacggtcttccgaaggaaatcgacaacatcaaatcctatgatacgatcttctgtccgaccattcgtgattcgcattctcagcacgctgagattagcatcagagctcgaatcgtcagcaggaacactggttgtaagttggtgttctacacggtggatatggattcgttccaggcaccgcttcctccgaaggttcgggcaaagaagaagtctgtccttcaggaactgttcccttcgcagagtattttgctgacgaatgagaagtatcatctgttcgaaggttatagtgagactgatcactacgaaggcatcgagttcaagattgacgatgagcgaaaggtagtgatgaagggttatcgggtgccttcagtcctcgaagcgccttgggatgattcaatcaaggacgcggactacctcaacatcctgatcactcggtatttcaatcggatggcggttagttacatcgcatttcacaatggcaataggtgggtagaatttaatggctaagattggtattgaagtagaaggcatgctgcgcggagagaacgttcgcacttatttctgttcggcaaaagaatacgtcgaggcagatcttctcaatctcatctacaatctgtatgtgaatagtattgagatgatctacatttcggatcatcacaacgagcttgacctgcatcacctcgcagaagtgttcaatgatagtggcatcggtgtcactgttgaactgaccgagttgaattcggttccgcctgcaggtgttgagatcttctggaatgtttcgcaggcttcttatgctcagtctcgtactctgcatttcctgcgtccaacggatcagatcaagatcgagaatgagaaacacgttcttgcattcgttgcaggcaatgcggtaatcacttatcctgaggactttaatggagacattgaagtatgagtgaagatttcatgagtggtatgatcgaccagattccggaacaggcaaagcgaaatctgttcatcattccgattgagcctctggaagagagatacactggcgagtggtacaagttcctgccacctgcctttgccaagcacaatttcaaggtcacccagattgatggcgagactctgaccgattcggttgagactggcgcattcctggatatgaactcgactatcttctacaaggcatctcagatgcagaagattgctcgtatgttccgtgagaagagcattccgaatggttcggtcttctttgtcagtgacttggaattctggggcattgaatctctgcgcctgatggcacagatcaacaaggtcgagatcaagatctatggcttcctgcatgcggcttcgtacaccactgaagatgcattcgcagttgcagcgccatatcagaagtacactgagctgggctggctgaaagctgttgatggcgtctttgtcggttcgcactatcacaagaaggcagtgatggaacgtcgtgtgaacgcgttcgcgaacgaagctgaccgtcgtgagattgagaagaagatccacgtgagtggcaatccactcttcccgagcgcatatgacacgacttcggttggtccgaagaagaacaagatcgtgatcaccaaccgattcgattctgagaagcgcccggatcagagtttgctggttgcactccttgtcaaggaagcactgcctgatacagagattgttctgacgaccagtcgtccgactttccgctcgaatcagaagtggttggttgacctcgctcgcatgtacgagaaacaaggtctgatcaccatcaaggaaggattgaccaagaaagagtatcacgacgagctcaagactgcgaaggtcatgatctcaaactctatcgaggaaaacttcggttactgcattgtagaggctatcatgtatgacgtggcgcctgtactgactcgaggtctttcgcacgttgaaattgttcagggctttgaccagttcctgttcgacaccaacgacgaagcagtaagtaaggttatcacattcctgcaacgcgatcagcttctcaacgcgaagcacttcttggattcttactttatggctgctgacttcatgggtcagatcatggcccaaggatgatatgacagataactacaacggaaacgaactccactacattgcaagcggaacgtctttcatgtacatcaactcactccgtcgagatggcggagtgaatgatgaaacgattgattgggtacgcaacatgttcgtaggagcagatcgtggacctaacaaattcggcatgctgttcaacgcgttcactgaatcgaccttcggtaaggtgttcaaggagaactatgctgacgtaatgtgcgacattcacgcagactcaggtggtctgcagatggtgtcgcttggcaaggttgctgatgatgcagctaagcgcaagatctacaagactcaggctgattacagcactgtagcaatgtcgttcgacgaaatccctgtctcgcagatctttgatccgtatgctggacgtggtgcaatgtcggcgacgcgtaagaaggtcttcgatcgctctcagctgaaagctaaggcaattgaatcaggaaagaatctacgtgaacagcttgaatactttgcggaagtcgggacgatcgctaagcctatgcttattgctcaaggcaattgtccagagacctattatgactgggttgagtacgtccaggatcagatccctcatgagctcatggacaatatcgcaggcgttgcagtcgcaacctcgacgcttggtcctggagatctagagaactacgaatcggcgtttgttgcttcgcagatgaatttccgttttgactgcaagcaaatccacttcctgggtgttggttcgtttgatcgtcttgctcctgttctggcactagctaagtcaggcgtctacaagaacaagatcatcagctacgacagcactactcacacaggtgggcttgctcgttcacgattctacacacgacgtcctgacggcacctatgttggaactcgtctgttgcaatcggatggatatcgcccccgtgattatcagttcatgatggatcacattggcaagttcaacatcggcttcgatgatccggaatcgctctacaagtatttcatcacttgcccgagctattctgccgttgaggcaattggtgagtcgcacaatcgaccattcattccaaagacaaagattgctctgttccgatattcgtacgataacttcatcacacagattgaagagtacatggattcggatggatacatgaagggcattcgtaaggcgcaccagcatcctatcgcaggtcttgctgaatgtcgcactcgttccgacttcaatgtctggcactcgacgttcaagaacgtgttgaagtcggacagagttcgatcgaagcaacagagcctcgaagagcttttcggttaaagacatagcatccgttgattcaccgtcacggatgctatatcatagttggaccatttaggagaaccattagatgaaaaagatttgggtaacattccggaaggcaggctttcaccgctacccagcagccggcacccaaggactcgaagacgtcgcgtaccttgcacaccctcaccgccacctgttccacttcaaggtagccattgaggtcttccatgacgatcgtgagatcgagttccaccagttcctcaacttcttggaagaggctgttgcactcaacggtcttgattacaagtcgtgtgagatgattgcagatgatattgcaaagattgttgctttgaagtatcctgcactctaccgaacccttgaggttgaagtttcagaagatggcgagtgcggcgttcatgcaatctatggcatcagcaatggcgaggtattcggctaatggcactgttcgaagtatcggaaatcttcagctcgttggagggtgaggcacaattcactttccatccgaccacctacattcgttttgcacgatgcaacttctcttgtccgttgttcaacaaccctgagaagctgattgatgcaaagggctacgcgcctctcgatttcgatccgaaggactatcaacgtctggaagatattccgctgattcacaaaggctgcgatagtcagtatgcagtcaatccgatcttcgcgcacatgtggaagaagtacgacacggacgcattgattgatgctctgttcgaggttcttcctcagggtaagctcatctacagcactggtctgcctcagatcatctctttgactggaggtgagcctactttgaagtggaagttcattcctgagattctgttccatcctcgaatgaaagatgcacgtcactatcttgttgagacgaactgctctgttccgttcaaggacgaattcatcagcaacatctacgagtggcttgcacaagactcgcgccgcatttggacatggagcaattctccgaagatctcgtccagtggtgaggatcgtaagcaagcgattcgccctgagattgctcttatgcagcacgttttgacgcacaacttcccggggcgtgtcaatcagtatttcaagttcgtcgttgatggatctgaggctgattacgctgaggtgaaggaagtgatggagatctactacgctgctggtctgcctcgaactgttccgatctggatcatgcctcaggcttgcactgacgaacagcagaaggttacggcgcgcggcattgctaagcgatgcattgatgaaggttggttgtactcgcaccgtgtgcagaatgatctgtggggcaatggcgttggcacctaagatgctaacgtatcacgaatggatggttgcccacaaatactggggcaactatcacgccgagtacggcaaatactgtgctaagtggagaagagataatgaagatcagaatcgaatggacaagcgatagcagtgattgcgaaacctgtggttgtaactttgccgacggtgcgaacgtctacattgatgaagtccttgcactagagttcattcctattgctcactgctacgatggagacgatttcactcgtgattacgtgtatgcgcaaattcttaagcatcttgggcatgaggtcatcgagggatgaacgagattccgatctcagctgcacagcacgtagcgaagaagtatggtttcgaccagatcataattattggacgtaaggtcggctcccacgagcacgtcacgacttacggcgttgacaaagagaactgcgacgcagcagctcttgcaggtgatcatttgaaatacaacgtgatgggttggccaagaccatgaacgatgagaatcgttggactgtgtctggcaactggtatcattggaagtggcggcgcctagcgttcgccccgacctgttgggacaaaggcatcggagattccgatggcgagtggttctacattggtatgggcttctacttcctcatcgtcgacctaagacaaggaggattactatgaaactatttcttaagagctatgatggcggcggagattccggcgtcacaggctattggttgattgagtgcaagtctttgttctcaatcgtattgcttcactttgaaggcaagagtcgcgaggcattccattctcacgcattcaatgctctgacttggtggctcaagggagccgtaaccgaggagatgaaggatggtcgaatcagaacttggtggccttcttggaaaccaaagtggacgccgaagaactgcttccacaagattcatgctgatcctaaaggcgcctgggcactaagcattcgtggtccatgggatgcaacctggtttgaatctaagaacggtgaaacctatgaattaggtcatggtcgtgtcagaattaatggtctagttgagcaggattccgaatgagtgaagtaacaaatgagcgccttgttctctcggcgctggtaaagaatgaagagtatatgcgcaagattcttcccttcgtaaaggaagaatactttgaggacgagtcggagaagcgcgtcttcaagatgatcaatgcctacgcgggcaagtacaatgagatgcccgacaaatcgactctgatggttgaggcaaagaatgatcgcagtcttgatgaaggtcgtagtgctcgagtaattgaaacagtcgcagacgttttcagcatcatccctagccagaacttcgattggttgaagcagatcacggaaacctggtgtcaggaacgagcagtctacaatgctctgcaggaaggcatcgcagtctatcagggtgagaacacaaaactctcgattgcagcgattccagacatccttgcaaaggcgatcagtgtcacgttcaacacacaggttggtcaagactacttcgatgacgctcagctgcgatgggacttctacaccaatcctgagtcgaaggttccgttccgaattgatacgttcaatgagatcacttcgggtggtctgactcgcaagacgctgaacctgttcgttgcaggtaccaacgttggtaagtctctggcactggtcagcctggctgcggattacattcgcgatggcctgaacgtgctctatgtgtcttgcgaaatgcgagaggaagttgtgttccagcgagtggacgcgaacatcctcggcatggatatgaacaagatcactgacattggtcaggagaagttcctcaatcgcatcgagtctctgaaatcgaagtcgtacggcaagctgaaggtcaaggagttcccaccgacctcagcatcaacgttgaacattcgacagacgcttgacgaactgaagatgaagcaaaacttcattccagacgtcatcattgttgactacctgcagattctcgcatcgtatcgtttggcttattcggttggctcctactacttcttcaagtcggtggcagaagagcttcgcgctctggctgttgagaccaacaccgttgtgtggtcggctgcgcagtttaaccgtggacagatgaacgcgacggacgttgacatgagcggtatcgcagagtcggcaggtatcgctcacacggctgacggtatgtgggcaatgatcagaacggatgaactggatcaggtgaatcagcttttgattaagcagctgaaatctcgatatgcgaacaagtcgatcaagaccacgttcacaatcggtgtaaagatcgagcatcagacactctatggactggacgatgacaggtcaggtgagttcactcaaatggactcgaagattgtcacagaccagaactcgctgaaggacaagttccaaagcgccaatggcggaagcaaattccaaggatttgaagtgtgatgaaagacatttggccagaactagtcaaggaatacgagcctctcattggggctctgtatcgatgtaatgaacacacctacaccttcttcggattggtgcacggtggtgacgactattactatggcatgtggcaacatggaacaggcaagtgtgagctcttgtcctgtgtaggtgcgcccgaatccttcggatacttccgaacacgaaacgcgacgagacacaaccgagtcggctacgctgaaatctgagccgaccgcagtcctatgtccgccagactggcccagcttttaaaagcgtatccagtaagttcctgattctgttgatattcttgacgggaagccctgctcagaaccaccaatagaatcagacacttacaagcctagtactgctaaggggtgtgccaggctcgagccagatgaccactcaaggtgacaccccggtttcccagggtgtcgagtggcctgcattgtcagatgtcagtccactatcagaatcccttgatcagggtcgtgtccgccatgtccttccagtcagcggcagaggtcttcatgaaaccggcgagctggttcaccgtacggatcgagaccgaccgcaggctcatcaagttgtcgttcatccacttgacgcactggtcgacctgcttctgatccagaccgaggtctgcacctagggtcgattccttgaggacctgctcgacacgaaccatgatggccttcgggttatggatgcacaggtccaggaagatcgaccgactcatgagagccagaatgtgcggagccagtcgaccttgcttggcgacgatgcgatccaggtcgaggttggtgatgaagacgatctgaccttcgtactggaatcggttcgggatatcgctgtctgcgaggtacttcgatgccttcgaccagctgatggtccgaaccgcactcgtgtccagcgctgccttcagaatgttcagtgcttcttcgtcgtagaacacgcgatccacgtcgtcgagcagcagcacctggcccttacctcggttcttatagagcgtctcgtagagaccgacggcgctgatcgtgcccttggtcgagtcgtaggacttgatcttcttggtgcgctctgcttcttccaactggcgctccaaagtgaaggtcttaccgacacctgccgaacccgacacgatcaacgaacgaatgttgccgttgaccatgccctgcccgagcttctcgagcatgttgaatcgcttgcggatcatcgcagcatcaacgggcttctcaggaacctcgacggcgctgtcatcgtcatcgtcgtcatccgaagcagttgcctgagccaagccggctgctgtaattgcccaaagaccacgaccgatcttttccagctcgccctctttagcgcgcttcaaatactctcggttgaactgaccaagttgacccgtcgtaacggtgtcgccaaacttcattctcagttctttcttcatcgtagcggtggtgctcatgatccagttccttaaagtggttttgcctgacatctgacaaccacaattatacggatttcttccccaggaacaacctacgtaagtgtctgattctgttggaaaagccaaagctaccaaggattcttcggtacacaatcgaaggattctgtgccgttctggctcgatccactagaattggacgacataaaaagtgaggcaattcgtcatgggtggcaatgcagttttcaatgatctttcggctcagccggtctctatcgtctgtcaagatagcagggatttctggagagcgaaaattgagcatctcatgctcacaatcaatcacgtcgcacgtcgaaccctctgggatatgagtgcaggcgccaagccttatcttgcaggctcaaccaagttcatcttcgatgacttcatccctacagctgagcttgtcaagtacaagaattccttcggtgacattgacattcaaattgatgttgagaagggagccgacttgatgtctgtcctcaatcttattagcgcaaatgaatgtgcaaatgagttccagattgtcgggtggcagcacacagtagacacaatcgtgaccatgtggtacgatgaagatgtgcagcagacgttccaagttgattttgagctcgtcgaattcgtcaacaatcgcccgacgaactggtctagattcagtcgatcgagttcctgggaagacacctgcgccggaatcaagggatttgctcacaagtacatcttccgtgcgatcactgctatctggcttcgtgaagcgcaggtccagctcaagacaaagttcgtcacaaaaaatatcagccctatcgtgttcagcccgaagggtgctcgagtgaagtggcgagagattcgtccggacgtctggcaagagattcctatggacgaggaagctctaatcaagaacgtcgaagacctgttcaagctattcttcaaggtcaagccagatgccgagtcaacctgtgagatgtattcttatcagggcgtcgtcaatctgatcctcacctggattgacaaggaagatcatcttaagatcgccgcaggtatgcgcaatcttctttggggtccgtatgctcagaagctgtaccgagacaatcctgcacgagacttctatgaaaagggtcaggcttatttgtatctgacagagactctgggaatcccggtcgagcccttcttcggatcggagaaatactatgagacgtattgatggcgttcttcaagacgattgatttcctcaaaagaaacaacgcggctattcttatcaacatcgtcttggcaaaggacgtcatgacgattggtaagaaggtcgacggtgaaagagttgtggttgaggctttgatgctcggtgacaagccatccgagagtgaggaagagctgacccaatattgtctcacagtgaaaggttcacctccagcactctgggcactcgacaattggttccctgtgacacggttcttcaaggatcccaggttcgttccaaagtcaaccatcaagggaacacctgaggtacgtgataaggagttccagcagaggcaagagaagtcattggttgacgtcatcaacaagtggagtcaaccgatcaagctggaaaacttccacatcaaacgagccgaacaggctcctgagattggaccacacggaaaagagaacctagttgatgtcgtggtatgggacgaacacaatttttcgtataatgtgagctgtaagatgtctaaggcagctgaccttggctccggtggcattgctggattgcagaagtcggttcctgagttggtgaccaaactctactatcaagtcaagattgatctgtatgagttaggtttcgaggaagggaaggtgtacgatattcgtaacatcccgactgtgatgtacggtattccggacatctacgcgtacaagatgttcgccggatcagatgaggttggtggcaagattgatttcatctacgttggacccgatcaggttgactacaatggtgaggagttcaacggcaagttctggccagtggaagagtatgctaagaagaagccatactacctgcggctgagaaagagagacgttcatgcgaacatggttcgtatcaacttcactaagctcaactcacacggacttccttgcattttcacaacaggattgggcgactttgcagcagcccgtttcgtaattgatgatagagtgccacctaaggcaactgtgaggcaactatgctagtagcagagaagaagcggaagaacatgaaacacttccgcgaaatgaatgatagagtgttctgtgaatggatccttggatatgaagtcgatcagattgatctgagttggaagctcgacggattcttcctcaggttcggaaaggacaaagagaacaaaccttggttccagactgcacgctcgcctgtgctctatgatccgatggagatcatctggcactcgcttgagaaaggctatgatcacactggcatgagccgtgctgaggtctacttccatctcatcaagaccatctgggattcgaacatcatgaatcacttgccagaagactctggcttcgagtgtgaagtgttcgacaagtcgatgtctgtcttgaacaaggagaacaacaccagaacgttcgtgaacattccgtacgacgaagagttctttaagacagatctcacgttggctatctacaagctcattgaggcagcaacagctgagacatggattgatgggtactactgtgacctgaaactagacgacaacatccagacattcggcactcgtttcaagattgacttcaccgcgaaatactatttcgagtgtggtgtcaaaggcatcacaggcaacggaaagcttcttcctattctggaatctcgccgacaggcagatagagaaaccaaacttggaatgaaggcagtgatcgcaacactcaaagatcaattctgttactatgtcttgaagcaggctcaagaccatcacaagatgggaaagaatttcgaaggggttgtcatcaccgtaaataagacagagtacaaaattgtcacagactacttccgagacttgatctacttcaagggagtgatgggtggctaattttgacttgttcttcggaaggttccagccggttcacagtggacaccttgctgttctcgagaggatgaacaaccctgttgtcgtcatcgtcaaaggaaaggtgtcatcgaaggacacggagaagaaccctttcgactttgcctatcagaagatgcttctagagaaggtgaagcctgatgttagggtgttccagtcagagactggatatctcccggacattatcaagatgcttggtgattgtcctgatgctgtctactgcggtcccgatcgcattggacagtacaaggcgcagatggaacgcgccaacaaagagcttgatgagccgtgtctcgtcaggttcattgaaacggagcgtgtgacatctgcttccgttgttcgtgaggccatccggtctggcgatagaaaagcctttaaggccaatgtccctagagcaatctgggatcagtactcaacaatgaaaaagaggttagaaaatggttgacttgacagtaactattccgtcgttcgaagacttcctggcagaagatgcaaaggcaatctcggatgcaaatcatcacaggaagaatggcgacggcgaaggctgcgacttgaagcctgttgtttcggacaagggctcgaccactccagaagtgattgagaagtcggacaatgctgcacctggcgacgacaatggcgaaactctgcctaagccaccggtgagctaagatgagcgaaggcgccaacgtaactgcaggtgtggcgaatccagacaacgtcatgccacccgagaagccacagaagcggaagggagaaggagagttcgcaaaggaaatcaatgcggctgtctcacaggctggtaagaagctggtagagtctctgttggaagcgaaggcgcctaagcaatttggcttgggcgacaaagtaaaactcaacggcaagcctgggcgaatcacttcggttgtcagcacgacagctgaagatggaaatccggggactcactggaaggtctctatcaggtacgaagatggcaaggaaaagacttacatgtctaaccgtgccaagatcgttgtggtagagaagcaccctcagtacaacaagcaagcagaatggcatcaaaaggatgctatggcagctaagcgtggtgcagactacactcgtcaccactctgagatggccaagtaccatgataccatggtcaagcatcacgactacgaaggcaacactgaagaagcagacaagcaccgcgcagcagccgtgacgcatcgtgctgaatctgagaagcgtgctaaggaagccgcagcaggcggaggctttgtaaccaagcgtgagatgcagtccaagcaacagcaagcctatcgtaaccatgtagctgacgaacgcgaaaagaagcgccagtgggaagaagctcgtaagacagccgcggctaatcgcaagtcctacaagcactactactctgttcctttcgctgacaaggatgaagctaagtcgaagggattcaagtgggatccaaacgagaagaagtggtacgttacttctcaattcccgaagccaggcacaatgaagtggaaggcttcgcactccgtcgatgaaaagacaggaaagaaagtcgatgattgatttcgatacatggttgtacgaagatctcaaagttcccaacgccaaggatggcaaagggaaaatgcgtcatggtatgccacagcttacgcagtttgatgcgttcatggcagacctaaaagacaacgacattagcacagaggtcaagtctttgagcccatggaagttgacgcctactcaaggcaacttcaatgaggagaaggttgactacctgatctcgagtgctaagtgggaagcgaagcctataattacaagtgccgacaactatgtcgtagatgggcatcatcgctggttggcggcagcaaagttcgggaagaagattcaatcgagagtcattggcatggattgcgatgacctgttgaagttcctcaagggcaaatcctatgttgaaacaaagacaattaacgagtgatattaatggcgcttcgaacccctgcaccaattagattttctctggagattccagagctaaacaagacgatctcttatcgcgcccttaaggtcggtgagcagaagtctctgttgactgttcttgagctgaaggatgcttcggcgatcatcaacacgattgtagacatcattgatggcattacgtttggcgagcttgatcttgctaagacgcctatgcatctcattgatttcatcttcctgcacgcatacatcaagtcgtcaggtgctcgctcaaaggctgagtacacctgtggtggcgagatcgaagtagaagaggaagtcgagatcgaggaaggcaagaaggaaattgtcaccaagactgttccttgtggatccaggcacgaactgctcctcaatctcgagaatgccacgattaaatatccagaaggatataaggcttctaaactggtacagatcgatgactcgatgtctatcaaactgaagatgcctgacttcgccagcttcaagaagctcgacctagacgcagacgtcattggtatctcagaccagtacatcttctctggcattgagtacattcttgatggcgagaacatgtctgtcccgggtgcggatttcgacttcgatgaaatgacgacttggctcaacgaactgccttccacggcgcttgatcagatcacggaattcttcgaaggcgttcctgtcctgtcccttaatgtggacgtgacttgccctaagtgcggcaggaaggatggtttcgagcttcaagggctcgacgattttttcctgtaatctatccagctaacaagctagtagacatgttagaactgaggcacctactagtaacagaacacggatatcgtctggatgaactggatgatatgcctttgttcgagattgaaatgacctctttgattgcagttgaaacccagaaaagaaagatgaatcaattaggttaaggtaaaatgcttccagcacttctaagaacagttggttcttcattgttgagatcagaggcggttagtgcaggtgctaaccgccttgtcgtcgcttcgagactcaacaaggtcgcaggtaacaagctagtccaaggacttgcgaaacactctggagcttccaaagttccggcgctggacaagattggtagttatcttagcaaggttccttcaggaaaagagaaggaaaagaaagaacgtggtacatccacttcttcatcttctaagaaccgtgataaggcccgtgatgatgctgccaagaatcaagagcgtcaagacaaggctgagaaggaatccctaggtgtacaggaagagaatgcaagccttctaaaggtcattgcaaaggacactgtacgcgtccgtgatgcggtcgaggccctggctaagaacggtgtcggtggaggcgcgggcggtgatggaatgatggacaagctgctcaagaccatcacttctctaccagcactgctcccttctcttctcactggtcctgcgggcaaacttggcggctttgtaaccaagtttgcatctaagattcctggcgttggaagactcatggggtcaatcggaggcatgggtaaggcaggcgaagctgcaacgactgtagctcgtgcgggtgtagctgcggaagcaactgcggcaagagcaggagccgctgctgttggacgacatgctctccgcgatcccaagacaggtcgattcattgcacgtagcgcagtacaagccgccgaggttgctccaaagggcattctggctaaggctggtgcagctgctgcgggtgttggtggtgcaaagattgcaggtaaggcaacaggcgcaattggtaagggcatcgcaaagacggcaggtaagtctctactcaagaagattcctatcattggtgcaatcgcaggtcttggtctggcagcaaaccgagcatacgcgggtgactggacaggtgcaggactcgaagcagcttctggtcttgcaggaactattcctggtattggtacagctgcaagtcttggtcttgacgcggctatcctcgcgcgcgaccttaagaatgacggaagttcgacacctgctgtaaccgcagcagccaagccagttactgcatccaagcctccggtgcacacggctgcaattgcagctgctccagtggtagcgcaacgcaaaaccgcggcagcgactgactccatgcaggtcactatggcgaagatgcttgatgtgatgactgaccgctccaagggcatctacatcgttcctgctgaggttggagcatccactcttcagactcgctcgccttataaccctcagggtgttccaacaggaaacaaatacgagccaatcgtcagtgcaagtccatatgattcagcaccaagcagcatcggtcccgctacggcaggtcgtacaatgggtgagggaacatccgtaacctccggtcagacaatgcgaggcggtcgtgttgagattggtccaacgggaaactttgaacgagatcttctcaatcagattgcagcaggtgaggcaggtaaggaaggctacgactcggtatggagtggttctcgtgtcaagccaaccaagcctgtgtctcagatgacattcggcgaagtgatgcagtggcagcgtgatacgctcaacgaacaaaagagccgaggcatcccagcaaatcgtcgtagttctgcagtaggacgttaccagttcatcagtagtacactcaaggcgcagatggctgcggcaggatttaaggaagatgatctgttcaatactgagaatcaggataagctcgctcttactctgatgaaccagggtggcaaccttgacaagttcaagtcgggcagaatctcagcggagaagttccaagattacattgcatcacagtgggcatcacaaaagacagcaagcggagcaggcatgtataatgctgcaggcttcaaccatgcaggtcacagctcacttggattcttgaaggcagctcaagcgtcaggttctctgacggcatcctcaggttctccaactgcaatggtaagagatgctgcacagcagaagcaagccgcacgtatggcgccgatcgttgtcagcgctcctacacaggtcgttcaaaacgggcaaaaggaagccgctgctccaagaacaacggcttcggcaacacctgtcattgtgcgtaatccggactcgccggttcgctcctacgtactatcgcaaatcaggacttcttgagcttcttcttgagctcttgaatctcatcgtagtacttctgagactgggacgtcaattcggcgttccagactttgcattggttgagtcggtcaagatagagttgagactctcctgcgaaactccaaagaaattggctagtttgtggagaaagtagttctcctgtgttggtgttggatccgttactgccgctggtgcttccttgaccaccggtggatccggaattaccacttgctgatgggtcgcgcaggcggataccagcaagcttagacacagcagcatcgagagaagcagtgcgcgccacataggctttgtcgagttcattctttttgtccttgagactggtttcaaatgtcaatttgagattagcagatgcgccttcagccgtagccaccttggtcgccatttcggcaacctcggctttgtgcgtagcttgaatggcatcaatttgtagacccttgacataccagattgagcctgcgccaccacctacacccagtacgagtgcgatgccgatgccccaaaggaatgtctgggtattcaatgcgagtttgcttagcattataggtgccccagattgtaacgattagtgacgtcctttaggatatcgacaacaattcgatttggccagacgtcggcgccaatcgaccaatcatattgatgcaagaacatgagaatagcttttgcgacactgaattgaacatcattcaggagcactcgacagatagctgttaccttctttggtccaaagacatttaaagtgacaaccatattattgatcagcaacttctcattgatttgaccggtctttagaaaccggtcaatcatcttccttgtagtcatgaagacagcaaagtctttgtcaaaagtcttggcatggaagacgcctttaccataaccaccaagggcgatctctttcgccaagtctttcacatcactcatctgggggaccttactcggcagccttcttgttgttcttcttgctggtctttgatgttgtcttagcagccttaggcttggtctcttcgacttccttggcaacttcctcgaccgacttggtctcttccttgattgcctgaccctgctcttcgctgataatagcaatggcttcaacttcaccagcatcatctagctttgcgatagcaccaatcggagcatcttcaaggacagcttcgattacatcaacagcttcttccttggcaaaatcgccagtctctacagaaaatgcatctgccttgatagcagcaatctcatcttcgctcagttcacggctccctgccggcacgatcatatcctgcaaatcttcaagagaatgcgtgcgctttgaccaaaccactgcgtcgggcaatccacgaatcgacacgacgagctcgccagtgcttgggttgacccatccgaggtgagtagcaactgcacccttcacgacttctttagttctatctaccatcttgtttcacctttaattggacgaatgcacggcaccgcattaaaatagatcacatgaactatctagatttgaaatacacgaggctcgtgtcaagttatttacctgggtggaaggaggtaagtgcaaccttgtctcgttttcgttgcccgttctgcggcgactcgcagaagtcggaatcgaagactcgtggatacttctatcagattgaaggcaatgcgaatttcaagtgtcacaactgtggcgcttcgatgggcttgtattctttcctgaaagaggtagcaccagtactggcgaaagagtacacctttgagaaattcaagggagtcaaggcgttcgagactgatccttttgagaagttcatctcgaagccaaagtttgcagacaagactctcttggatgattgtcaggctatctcaactctggaggacgaccataaagcaaaagactacatcaagggtagattgattccggaaaagttcttcggtgatctctactactgcaaagatattcgtttgattgcagacaggcttgatgactatcgagaccgagaactgcctcgtagtgattgcatcatcattccgttctacaatgaagcgaaggaactggtctacatgcaggctcgtttctttggtgacgtttcgatcaggtacatcacactccagattgatccgaacgcaaagaagctgtggggccttgacagggtagattggagcaagaaggtctacgtctgtgaaggaccgttcgacgcgatgtttgttgagaactgtatcgcagtcgcaggcgcaagtatcatgtctgaaattaaatacctgcgagaacatgctaaaaaagaccttgtcttgatcttcgacaaagactatcagacaaatccagaggtgtatgggcaattcctcaaagcggtcaatcaaggcatcaaggtcatcatgttcgatccgcagttcgctgctaaagacatcaacgcccaggtacaacatggaacaagtattccagacctacagaaatatcttgagaaacggactttctctgggctcggtgccaagctcgagcttacgaaagttagacgtccactcaagagaaaataatggcacgtaaacctcacaagtcgccaaagacatcgcagcatgatccactcttcgacaacttcaacctcgaagcaaagggatcaggtactcaagccgaagcacgccttgactgggaggcaggaaagaatcttgtcctgaccggttatgcaggcacaggtaagacgtatcttgcgctcgccctagcactccaggccatgatggcaggagaggtccgacacattcacatcgtccgctccgcagtttcttcgcgagacattggtcaccttcctggtaccgaagcacagaaactcgaagtctacgaaagagctatcaagtcaaacttcaacaagatcttgaagcgtgctgatgcctacgaatgtctcaagctgaagggcgccgttagttttggatctacttcctttgaaaggggtgtgacatatgacaaaacctgtatcattgtagatgagtttcagaacgcctcattcgcagaacttgatacggtagtaacgcgtctaggtaatgactccagaatcatcttctgtggtgacactcgacagacagatttgtctcctggtaagagtggattccataggtttgttcgaatcgcagatgcttgcggaaagttcttcattcgccatgagtttggtatcgaagacatcgtaagaagcggtttggtcaaggcatggatcatcgcagccgaagatgatgcaatcaagaacaacccaacctgagaaatgaaatgattatcactgatgatgtaatgacctcgctgtccgataccgatctgtctgaaggcactacgagcgcagcgaacctgtatgctcaggcgctgtatcgtgatctggttcgtcaggcactcgctcgtaagagtaagcacaatactgctcgcgccctccgtggtcgtgctcgtattgccaagcgcaaggctaagcggaagtcgtaacatatgagcagcaagaaccgtcgtgacgaaaccaacgtcgaccacttcgcttctagtaaagaccgccgtgccgagaggaggtcgaaagatctcctccggcgggcgcatgatgtggatgaagactgggacgagtatgaactagactctcgcgagattcaccgcaaacgaaatcaacgaatggattaatcatgatcgttattgatatgtcgaaccttgtgttctcacaggttctcgacttccatcttaagaccaaagaacaggttgacatgcccgtcgtgcgcaatctgtgtatcgacaagatgaagtcgcacaaagcaaaactcggtaaggagttcggaccggagattgttctggcgttcgactctaagcattattggcgtaaagacatcttcccttactacaagggtaagcgaaagaagggtcgtgacgaatccacatttgattggaaatcgttcttcccaatgtatgatcagttcaagcaagagcttcgtgattacttccctgtgaagtgtctggaagttgaaggcgctgaggctgacgacctgatgggtgttcttggtcctcgttatgcgcctcacactccggtctgcctggtaacgtctgacggcgatatgatccagttgcagcatcagaactcgaacatcaagcagtggtcgccttggcacaagaagttcctcactccgaagaatgctgagtatgatctgtttgagcatatctgtcagggcgatgcgggcgacggtgtgccgaacattctgagcgatgacgacaccttcatggctgatccgaagaagcgccagaagcctcttcgcaaagaccgactcgcagagtggaagaagcacggcatcaccaatccagaatacttctgtccagattcggcagcgcttgatcgcttccaccgaaataggaagttgatcgaccttcggtgtattcctgctgacctaaccactaaaattgttgaatcctatgaggcggctgtgcctgcaacaggcaagatgttcggttacctcactacgatgaaactcacaaagatccttaaggaaggcggcttctaagatgccaatgtacgacttcaaatgtaagacgtgtgatcatgttcaaactgagatcatgtctattgcccggatggaatcaggcgaagaagccgtatgcaaagagtgcggtggggtgtctgcaaagaccttcaccgcaaccaattgggaagctgcatcggctgagtcacttggtcggaagaaggctcctgaggacttccgaaacttcttgacacagattaagaaggcacatccaggtagtactatcaaagatcattaatcatggctaagtctgcggacggaatgtggggctatagtacccgaaaagagacaaagcaatttcttgaaaagttcatggccaagaatcagtccgagactgataggtttattcatacatacacgtcactcctagatggtatgtatgatatcaaggagacgatcaagtctacgtcttacagtgaacctgaggaagtgaagttcatcacaggtaaagtcaagcaactccctgaccccgatgtgaactggggcttctcaactattggtgattcactttatgactgatctcattcaactgcgaaagctcgtcgcagaatacaaggctgatcacaagccgctcgaacgataccctggtgtaactcgtgtcctcagtggcaccaaagacatgacagggcttgatgcatggcgtgatcgaattggtcatgaagaggctgatcgaatcgttgccgagtccaagatgattggttcctcactcgacaagatcttcaacgattcgcttgagtcggtcatcaatcaggtaccatttgaagaatccctttatgagaacgaggcaggctataaactgtttggacagttgaagccctacttgaagagaaccgagccggtagctgtccagcttaaggtctggtctgatcacatgaagatgatgggttacctggattgcctgggtctttatgatggtgtccttactctgattgattgtaagaactccaagaaggaaaagcgagaggaatacctcgaggactactacctccagtgtactgcctattcgatgatgctgtatgatatgcttggcctaaagatcaagcagatggcacttttcattgctcgacgcgattcaccattcccgcagatcgtcatcagagacatcaagccgtttgtaccgatggtgttgggtcgagtaagaaattactatgggaaccttgcacaatgaaaatcaaaggcactaagatcgaaacagtcgatgttgatatcgatcctttggaagtgatcaagacttgctacaaaaggtggaagagtactactcctggcgagttcatcaggaatggtaattggtatgtcgaggtgcacacctcacattcgtatgatgaattggttggtccagtgtctgatcaagacatggaaatctacaaggcattccagatcgtctcagaattaatctcaggaatgaaatgaattacagtgaaaagatcctcgaggaactgacgctaagagcaaggcgagacaacatcggcttgttcgaggcagcatcagactactgcgaggaacatgatttggaacaagccgagttcgttgaaacactcgaccctatcatcatccaacgtctcaaagaagacgcagcccgtgaacgtaaagtcagaagatgcgtgcagaaaccgtccaaaactcttttctgagtgcaccactcagaacattccaagattatgtcgggctcaagctacacttcaacggtgacttagtatggaagcgccacatggtgctttcgcttcgtgaggagcagctgctcaaacgaaaggacgcatactatttcatccagttggctgagcagcatgatcgcgaaaagatcatccaaatgatgatctcgatgttcaagcgaaagcgtgactcttggattggtgagattctcgaggaggagaacgtcgagtatcacaagaagcggatggctgtaatcaactcgttgaagtacgttattcgtaccgacattgaacgcatcgtgttgttcatggaggacaataagatagatgttcgtaaactccttttgtcggacggtcaaagtccgtatattgtatcacaccagtcggacattattggtggtgtgaccgacgaaacactcgccctgttagagagggcgttcaagttttgctcacaggacacgttggaccctctttgggaagagcgcaagttcatgctgggtaaatacagtagctggattgaggtggacggagacttcctgaaacaacaactcaaccggctagtagaggcgaagtaagtccataagagacagtaagacctcaattcaaatagagaaaacggagactaaagatgtcatttgcagcacttaagaagcagcgtggtaatttcgccgacctcagcaagaagcttgctgatgaaaagaagggcggtggtggtaacggtccagatgagcgctattggaagctcacgaccgacgaagctggtaatggttacgccgtgatccgattcctcactgcaccagtgaacgaggaatacccattcgtcaagatgtactctcacgcgttcaagaacgatcgtaccggtaagtggtacatcgagaactgccgctcgaccatcaatgaagccgacccggttatggaagtcaattccgaactgtggaactcgggcattgaggcgaacaaggatctcgctcgtaagcagaagcgcaatctgaagtacatctcgaacattctggtcatcaaggactcgaagaacccgcagaacgaaggcaaggtcttcctgttcgcatacggttcgaagatcttcgaaatgatcgaagctgctctgcagccgaagttcgaggacgagaagccgttcaatccgttcgacttctgggatggtgctgacttcaacctgaaggcatacaacggttccaacaagcagcgttcgtacgataagtcgggcttctcggcaccggcacctctgttcggaggcgacgacgcagcactggaaaccctgtggaacaagcagtacagcctgcaggcagaagttgctcctgagaagttcaagtcgtacgatcagctcaagacccgtctacaggcggttctgggcaacgctccaggtggacgtcctgcatcgcaggcaacgagccaggcacaggctgtggaacgtgaattcgcagaaccggcacgtccggcaactcgtcaggagccagcagcatcggcaagtgacaacgaggacctgtcgcagtatgcagcgctcctggaaggcttcgacagttaaggtcgaaaccatagtttgattaaataaaggaacggcgcaggtcgttcctttatttttagctgacaagaatatgatcctacaagagaacagcttttattcagaccaatctggtctcgctacgttgctcacaaacaagcaactcgtagccgatattttctatatcaacttcctcgggtttgctggactccttaagatcaaggacgctcctgcgctgatgacctatgtcaagggtttgggtaagctccagctttccaacatgacagacaccaatgctgattggagcctggctatcaagctggcacatgatgcaggtatcatcaacatggtcgctgccaacatggcaacgaagttccttgcactggtcaagagcggaaagattcgctcagctgaccttaaggacgatccaatccgagatatcatcaaggcttgccgtgtaatcagcaacaagccttcaccccgtatctatcaggctgttcaagactttgttgatgcaaaggaccagctagagacgacaaccgtcaagctctggaagctgtctgcacgtccagagctaatgaccgctgctaaggaattccgtgaacagatcaccctgggtggctattcgtccgcattcctgaaacaccagtgggcaaatggaactgcaacgacgcctgctccagctgtagctgttcagcagccaccagcaaagggccagcgtggttcgttgccacctcagggtgctgcacatggttccgactcggattacatggctgctcttctccatgtgttcaagctcaaaggtggtattcacagctacctggaacgtttcggcttcaagggtcactttgacgttgatcgtttcaagaaggctgtcgcatctcctgagttcgttctatctcatggctatcacgtgccttgggagcagcatccgtttgtccagtggattcgtaagaaggatccttcggcttcggcagctgtgctcaagatcctcaatgacaaggatcgtcagacaggtgcaatcgctgtagcaactcaggtatcgaatactgcacctcaggcacctaagccagctgctgtaatccagactgtcgttgcaaatcgccaagagccgattgtgactaatgagtctatctctgagatgtacctcaacggttttgatcctaagcttcatgcgttgatgatgaagtatcattggcctaagggcgaagaagcgaacatcatcaagtcgaatcttcctaaggttctgaacgccctcaagacattcgaggttgatgagcttaagaagcctcatggtcgaattgaacagagcgaatatacgcagagcacctttgcgcgtatgcttcttggtaacggcgtgatgccatcccagatcaacggacctatctacaacactctgttgaagtcgggcgagagaaaggacgctgatgctgtattcaatcttctgatcgattacaacaacgcatccactttgaagcagaacgcgtttggtggcgacttcggtaatgacccagttacgactgcggtgtcccgcctgtttgatggtgatggtgttgatttcattcttgatcacctgtcacagatcaacagcgtaggattccagccaatcgtctatgatgcaggtaagcatctttggatcggaaacgatgccgaaacagagatgatccgtaacctgatccaatgcttgatgttgcctacgtcaaccctggacggaattgttcgcaacatcgaggcaacgtttgctcgtcttgatatcagaactggtcgaaccatcggaaagaaccttgcagttgacaaggaatccttcgataacaaggcgtctgcaaaggtcaagaagctcgtcgatgcagtgaataaggaaggttacgttgatatttccctgaagaaattcgaaggtgatacgatggagatcctcgacctcctgacagtagctaagaaggtcacgcagggtgcttcctatgcaatgtctgatcactttgtttctctgttgggcgatgcaatggctggcaagtttgatatcacgccagtgatcaaggacgaggaagacctgttccttatcttcaaggcattgcagcaagcagcattctacatgaatgcaacatcccgtgctacggctggaactatcatgccttggctgtatgagaagatggcagctgttggatctttgaactggaagatgaacagagcgcctaacccatatggtgagtatcctttcccacaggctactaactatttcaagtatctgctcgaaaagggacacaccacagcggcacgccatgttgctccatggatgatctactacggaacaggtagcgatatcttcaagatgatcattgcgcagttccctgagctgaaggaagaagtcttcaagcgttctggacagatcggtcatggcggtacgacatttgctgcgattcttgatcaaaagtttgatcctgttgctatgccttatatcagcctcgacgcgctgacctcatttgttcgttcgattgcaatgcacggatcaattgaagatgctgtcaaggctgcgcgctgggcaagagaaaagatcatgaaggaacaacctgatcgtaagccttgggaacaagctagtccttctatggtaggtcttctgggaactgcttggttcgttgagccaagcgatcctcactatgatgatgcgctcaaggtggcttcaaagtggctgatctctactctcaagcaacaatatagcgaaagtgacatcaaactgttccaagcctacaacccagagttctggaaggtatggatttcagaaaagaagaagggcgctgagaatagtcctcacgctacaacctcactccgtggtatgatggacacttctgagtattcggaactctacatcaactgcctgaaaggccagggtctagatgcaatcaaggcaaacctgattgactcgaccacaggttgggctgctcagttgatgcaggttgcggactcggatgacattacgattgacgccaagaaggagcttgttcgtagattcgctcctgcgatggaagttaacggcgttcacaccatccgagataagtcgcaccgtgactcgctcaacaagaactttgctgatgttctgctcgacgtctatgactcggataaggaccttgcagacaaaatctttgctgacctgccgcgaacaactcgtactctgatcgtaaagatgcagggtgagatggcttacatcgaagcaatcaaggacgacctctacaagcatcctatcaagcctgacttcccgcttgaccatgctcgtattcgtacgatcttgaagtacaacaacctagctatccgagtcacgtctaaccgaaacattgtccagaccatcggtgatattgattcggcagctaagtcttcgatcagcaaggctcttgtggacctcaaggtctccgaagtgaaacaggatgagacggcgcttgaactcgagacaattcgtctcaacaagttccgaaacaacaagcacggcgaagttgcattcaaggttctcaaatcgtttgacgttgcattcccaggcgcaagcaagagaattgccgaattccgaaagaacaatcctcaggatggtacgcttgatcctgtgttccacggaacaggtacaattgccgcttcgatggttctgcgtaacggattccagatcattcctgcaaacgactcctcagctgttggtcgtatgcttggtaacggtatctacttctccaatgtcatcgacaaggcacagcagtacgtcggcgacaagggtggtggcatcacgcgtagctatggtacacgtggttacatcttcgagatggaagccgaactaggaaagaaccctaaggactatcgttccgctggtctcggtcgcgactctatccgttctccggaatgggcagtgtttgatccggacaatcagcttcgtatctacaaggcatactacattgagcttgtaagcctcaatgcggttaaggcgatggctgcaaagcacaacaccaagttgaatgaatcggtaggtagctcatttgaagattacatgatggagaaaactgtggatacaaaggcaacatcgaagttctggttcatgggcgattcgttgcccaagtcgatgacggaaacttgcgaagtcagcgagttcaagtcgaagcgaaacgtctacacagaaccatcgtgggacggcggtacgatcgtttctatcgaacattcgctagacattgagccggtaacgatttcgattgatgacacggcgaagtggctgttcaacaagccagatgaagctaagttgttcttcgatctgatgaactgatctactaccaataatagctgggctcggaagggtccagctattatactatacgcacatcctatgagagaccccgcatgagcgacgcaccatttcatctatccattgataccgaaaccctcggtatgcgtgaaaacacggttgttctgtccatcggtgtagcagcattccagctggtgccaggtgcgaagaacgactatgacaagatcatccgtgacggcttccatgtgaagttcaatgtcaaggaacagattgtcaattacaagcgcaccactgaccagagcaccattgattggtggaaaactcaggaacctgcagcgcagaagattctcaagccttcagaagaagatgttgacatggcttctggtctgacaatgctcaatgactggatcaagcgttcggggtatcgctggaaagattcatttgtctggtcgagaggtacatactttgacttcccgaagctcgaacacatgtatctgcaagcgggcgtgaagtgcggcttcaacacctggaagattcgtgacacgcgcacgatgattgacgttctgactggctcagaaaacggacagtacgaaccagcaggtggcttcccgagaaacttcttgaagcacgacgcactgcatgacgctgcaatggacgcctaccgcatggttgagatcttcaatcttgctgcaggcggcgaaccggacgatggtccgccctggaaggaataaaatgagactctacctgatcgtaaaccgctatagcatgagtgtccaggcaggcattcaggggatgcacgtcatccccgagctgtacgaaaagttcttgacccctaagtggaatcgcgcctacctgtctaatctttctgactgggctcgcaaccacaagaccatcatgctgctgcgcactttcggcggtgacgaaagtatcgaagagctttacgaaaagattgcaccgcctgcgaaaggtttgcaaatgccgttcgctctgttccgtgaaggtgcgatgcgaaactgtgcaactgctgtgggcgttgtagttccgacggcgtactacagcaatcctatcgaagaactttctggcgacctgctgactctccgcgaaactttgagtcctttcccgttcgccatctaagattgttctttctttgtcatcgtttaaactgtgaacacatcaactaaaggaacaccgaagtgagcttgtcctacacccacagcgaacgcactgtcaagaagtacaccgtcaatcaggcatgcacctcggcgcgttatcgcctcgagaagagtggcctgaccagcctgtgcaccaattcgatcagcggtcgttcgggtagtgagctgatcactctcgaagagctgaacaagatcgctgacgccatcgtcgacgacaccttcctgtacgatggccacaaggcccgtcgccggtgataggaatgggtatggaagtctacttccgtagctttgtcttcgataccctcgctccttacttcgacaagtacaagggaatcaagttcaaggttgtgcgaatcgttgaaggttcgcacatccagcttgaagccattgacagcgatgtcaaggttgagggtctcgtccacgcagactatctgaaaagagcatgacccaggatatctacaagcaacttcgtgacctcgccggaaagatggatgtgaccatcatcactgccaaggctccgccccgttgggaaccggaccttcagggcggtgttcgtatcgtcgattatctcgacatcttgaagcctttgggtggtcttcgccggggtgaactcactgtgatcagcgcaaggacgtctgccggcaagtctcttttgtcggaggcttcctgtggcgctcgctaattacgatctgttcctcgatgacgagcgtgacccagctgggtctcttgaacatgctgaggtggctcgcaactactgggagttcgtagagataatcgaagagctgggcattccgaggcacgttgcctttgatcatgatatcggcgatgattactacaacggtaagaaatgcgctgagtatctggcagaacgattctacgaacaaccgtgggacgcaaagtacttcacctacagcattcattcccagaatcctgtaggtgcagagaacattcgcgccttcctcgaaaacatgaaaaggcatttcgctgatggataagaatgattggcaggcttctgcaaagtcaaagaagcatcttcgtaattgcatggcatacgagttgagtcgtgcaggtggcaatgtcatcttccgattccatttctccagacaccatgtcttccgtatcccggaaacagaatgggaagaactacctaatggttaagcacctcttcaatcctgaaaacgagagatacacgactgaggcgcttgccctttctgaggaagtctttgaggcgatcaaaccgatcgtcgacaggtatgctgaccaagggtatagcgtgcgagacattgcttctattgtccattccgaagtcgatatcgctacgattctgagaatcatctgatgaacccaaccaaacaaatcgcgcttgagttggaacaggcacgtcgagaattccttgatgagccgtttactgccaagtggccagaaggccttgagcaggaacaaatctatcaactcgactgtgacgataagggtcgcagtggcgcgaattggttgaaggtctacaccgccggcgatggcgatgtgcatttgatgatgcaagactgggaagagtatcccgagtttcaacctgagttcatgccttcgctgcgttgtcgaacctatatcggtggaggtcggaattggcgtacccaccaggcattgctctggcttgcccaggcaattagactagacaacatagagaataggcgcaaccatgtttaagattttcaatggtacggtcaaccgtacacacttcggtgccttctacgggatcatggtgacccatgcttcgcagtggaacatcgacgaaggaactgacctcattcgttttgaggtttcggtactagatgacaaggctgacagtttccgagatcagctgtgtagactagtcccatgcgtagagttcgataaggagcctacggcttgggaaatgctaatcaattttttcaccaaaaagaaaggtaacgcctgtgaccaatgctgctgataatgctgtcgagtaccccgttctgaacgatccgaagatcctggccaaggtgaagggtgtctgtcaggacattagcaatgtgatgaccatgatcgaagcttcgcgctcgaccatcaaggctcacatcgacaacctggcggaagagatcgacattccgaagaagctgatccgacagatgagccgtacctatcatcgtcagacctttgaaaccgaagtacaggaaaaggacgctttcgagcagacctatggaaaagtcttcggcttcgacaacgactgagaacgaaatgttgcgcctcatcaacgagctttatgaggcgctcgatttcgatgctgagcactgtgactttggtcctgcctacggcatgtgggaaacgcgtcgtcgaaaggctatgcaggaagcacgtcgcctgttaaaatcaaaaaacttcaagcggagttgattatggctattctcgcagttctcctcggtattgtcattgtcggtggcacgttcatcctgctcgccgatatcttcatcattcgtcctctcgagggatacagaaaggatcggtggtacgaccggttcgtcatgtaaagaactcctgtggtggttgggcacgagacccctagaaataggggttcttgtgtgataggctagtaagtgtctgattcttggtgccacacagatacgtaagtgtctgattcctaaggttgtcctgcacatagaaagaaactaatatgtggctgtaggcaataccaaccaaggaatgcagaaatgacggaagaaaagacgtatcgggttcgcagtcgtgtcctggctcttcctaaaggagccgacaaggcgaaacagctggagtatgcgctcaagcgacgtcgtcggcagaaaaagtcttggcctcagcctgaagatgcaatgctgattctccctctgcacttcaacgtctattcgttcagtcgtcagagcttccacgccgaagcctgcatggaaattccgaccaagaaaggtttcgagtatttcactgtcagcggtggcggcaggacacagtttgctgcactgaggcaggtcattgaaaagatcgaggcgtcagactggttccatcagatgaaggaacagaaagtctacttcaagatcactggcggcggtatggaggaaatctaccgaggttacctctgatctagtatcgtagttcatttgtagatgccaaccaagtctttaaaataacggatgtagtaaacacattcctgtggacattcgttatgacagaacagacaaagacaaagcgcaaatacaccaagaccttgaagtgggaagtgaacaacgagcaattctctgggttgacccaggcactcaatcgagtgaatgaactgctcaagactggtgcttcggaagacgtccgaatcaaacgcatcaagccagcaatcacgttctaaaggacacgggcgagagatcgccccttccttttgtcagaaattcaagctaggagttaatcatggcaactcacgttcgtattgactacgacgaacatcgttacgttacgcgtgctggatcaccggatgatcgctgggatcgcgacgatactgctgcagacatttccatcaacggcattgaaatcgtttctgaggcgcggtaccgcgaccttaccgttcccttcgatgtagacatcaacaagtcctacattctgctttgggcggattacaacaccggcgatagctttggacacgacagaaactacgtcgag
